(19) United States
(12) Patent Application Publication
(10) Pub. No.: US 2024/0318184 A1
(43) Pub. Date: Sep. 26, 2024

(54) PATATIN-LIKE PHOSPHOLIPASE DOMAIN CONTAINING 3 (PNPLA3) iRNA COMPOSITIONS AND METHODS OF USE THEREOF

(71) Applicant: Alnylam Pharmaceuticals, Inc., Cambridge, MA (US)

(72) Inventors: Ho-Chou Tu, Boston, MA (US); James D. McIninch, Burlington, MA (US); Mark K. Schlegel, Boston, MA (US); Adam Castoreno, Framingham, MA (US)

(21) Appl. No.: 18/525,922

(22) Filed: Dec. 1, 2023

Related U.S. Application Data
(63) Continuation of application No. PCT/US2022/031755, filed on Jun. 1, 2022.
(60) Provisional application No. 63/232,797, filed on Aug. 13, 2021.
(60) Provisional application No. 63/195,769, filed on Jun. 2, 2021.

(51) Int. Cl. C12N 15/113

(52) U.S. Cl. CPC C12N 15/1137; C12Y 203/01051; C12N 2310/14; C12N 2310/313; C12N 2310/314; C12N 2310/321; C12N 2310/351

(57) ABSTRACT

The present invention relates to RNAi agents, e.g., double stranded RNA (dsRNA) agents, targeting the Patatin-Like Phospholipase Domain Containing 3 (PNPLA3) gene. The invention also relates to methods of using such RNAi agents to inhibit expression of a PNPLA3 gene and to methods of preventing and treating an PNPLA3-associated disorder, e.g., Nonalcoholic Fatty Liver Disease (NAFLD).

### RELATED APPLICATIONS

[0001] This application is a 35 § U.S.C. 111(a) continuation application which claims the benefit of priority to PCT/US2022/031755, filed on Jun. 1, 2022, which, in turn, claims the benefit of priority to U.S. Provisional Application No. 63/195,769, filed on Jun. 2, 2021; and U.S. Provisional Application No. 63/232,797, filed on Aug. 13, 2021. The entire contents of each of the foregoing applications are incorporated herein by reference.

### SEQUENCE LISTING

[0002] The instant application contains a Sequence Listing which has been submitted electronically in XML file format and is hereby incorporated by reference in its entirety. Said XML copy, created on Apr. 9, 2024, is named “121301_14803_Replacement_SL.xml” and is 11,424,093 bytes in size. The sequence listing contained in this .XML file is part of the specification and is hereby incorporated by reference herein in its entirety.

### BACKGROUND OF THE INVENTION

[0003] The accumulation of excess triglyceride in the liver is known as hepatic steatosis (or fatty liver), and is associated with adverse metabolic consequences, including insulin resistance and dyslipidemia. Fatty liver is frequently found in subjects having excessive alcohol intake and subjects having obesity, diabetes, or hyperlipidemia. However, in the absence of excessive alcohol intake (>10 g/day), nonalcoholic fatty liver disease (NAFLD) can develop. NAFLD refers to a wide spectrum of liver diseases that can progress from simple fatty liver (steatosis), to nonalcoholic steatohepatitis (NASH), to cirrhosis (irreversible, advanced scarring of the liver). All of the stages of NAFLD have in common the accumulation of fat (fatty infiltration) in the liver cells (hepatocytes).

[0004] The NAFLD spectrum begins with and progress from its simplest stage, called simple fatty liver (steatosis). Simple fatty liver involves the accumulation of fat (triglyceride) in the liver cells with no inflammation (hepatitis) or scarring (fibrosis). The next stage and degree of severity in the NAFLD spectrum is NASH, which involves the accumulation of fat in the liver cells, as well as inflammation of the liver. The inflammatory cells destroy liver cells (hepatocellular necrosis), and NASH ultimately leads to scarring of the liver (fibrosis), followed by irreversible, advanced scarring (cirrhosis). Cirrhosis that is caused by NASH is the last and most severe stage in the NAFLD spectrum.

[0005] In 2008, a genomewide association study of individuals with proton magnetic resonance spectroscopy of the liver to evaluate hepatic fat content, a significant association was identified between hepatic fat content and the Patatin-like Phospholipase Domain Containing 3 (PNPLA3) gene (see, for example, Romeo et al. (2008) Nat. Genet., 40(12):1461-1465). Studies with knock-in mice have demonstrated that expression of a sequence polymorphism (rs738409, I148M) in PNPLA3 causes NAFLD, and that the accumulation of catalytically inactive PNPLA3 on the surfaces of lipid droplets is associated with the accumulation of triglycerides in the liver (Smagris et al. (2015) Hepatology, 61:108-118). Specifically, the PNPLA3 I148M variant was associated with promoting the development of fibrogenesis by activating the hedgehog (Hh) signaling pathway, leading to the activation and proliferation of hepatic stellate cells and excessive generation and deposition of extracellular matrix (Chen et al. (2015) World J. Gastroenterol., 21(3):794-802).

[0006] Currently, treatments for NAFLD are directed towards weight loss and treatment of any secondary conditions, such as insulin resistance or dyslipidemia. To date, no pharmacologic treatments for NAFLD have been approved. Therefore, there is a need for therapies for subjects suffering from NAFLD.

### SUMMARY OF THE INVENTION

[0007] The present invention provides iRNA compositions which affect the RNA-induced silencing complex (RISC)-mediated cleavage of RNA transcripts of a gene encoding Patatin-Like Phospholipase Domain Containing 3 (PNPLA3). The Patatin-Like Phospholipase Domain Containing 3 (PNPLA3) may be within a cell, e.g., a cell within a subject, such as a human subject.

[0008] In an aspect, the invention provides a double stranded ribonucleic acid (dsRNA) agent for inhibiting expression of Patatin-Like Phospholipase Domain Containing 3 (PNPLA3) in a cell, wherein the dsRNA agent comprises a sense strand and an antisense strand forming a double stranded region, wherein the sense strand comprises at least 15, e.g., 15, 16, 17, 18, 19, 20, or 21 contiguous nucleotides differing by no more than 0, 1, 2, or 3 nucleotides from the nucleotide sequence of SEQ ID NO:1 and the antisense strand comprises at least 15, e.g., 15, 16, 17, 18, 19, 20, 21, 22, or 23 contiguous nucleotides differing by no more than 1, 2, or 3 nucleotides from the nucleotide sequence of SEQ ID NO:2. In one embodiment, the dsRNA agent comprises at least one thermally destabilizing nucleotide modification, e.g., an abasic modification; a mismatch with the opposing nucleotide in the duplex; and destabilizing sugar modification, a 2′-deoxy modification, an acyclic nucleotide, an unlocked nucleic acids (UNA), or a glycerol nucleic acid (GNA). In some embodiments, the antisense strand comprises the at least one thermally destabilizing nucleotide modification.

[0009] In another aspect, the present invention provides a double stranded ribonucleic acid (dsRNA) for inhibiting expression of Patatin-Like Phospholipase Domain Containing 3 (PNPLA3) in a cell, wherein said dsRNA comprises a sense strand and an antisense strand forming a double stranded region, wherein the antisense strand comprises a region of complementarity to an mRNA encoding Patatin-Like Phospholipase Domain Containing 3 (PNPLA3), and wherein the region of complementarity comprises at least 15, e.g., 15, 16, 17, 18, 19, 20, 21, 22, or 23 contiguous nucleotides differing by no more than 0, 1, 2, or 3 nucleotides from any one of the antisense nucleotide sequences in any one of Tables 2, 3, 6, and 7.

[0010] In one aspect, the present invention provides a double stranded ribonucleic acid (dsRNA) for inhibiting expression of Patatin-Like Phospholipase Domain Containing 3 (PNPLA3) in a cell, wherein said dsRNA comprises a sense strand and an antisense strand forming a double stranded region, wherein the sense strand comprises at least 15, e.g., 15, 16, 17, 18, 19, 20, or 21 contiguous nucleotides differing by no more than 0, 1, 2, or 3 nucleotides from any one of the nucleotide sequence of nucleotides 187-209; 214-238; 219-245; 283-305; 351-379; 361-391; 395-419; 416-439; 472-494; 483-506; 570-598; 618-649; 631-654; 636-659; 640-662; 643-677; 676-710; 740-772; 782-805; 803-825; 810-842; 864-905; 905-927; 910-934; 919-942; 953-983; 1062-1087; 1069-1097; 1078-1108; 1094-112; 1164-1187; 1170-1199; 1180-1212; 1196-1224; 1234-1262; 1259-1297; 1278-1318; 1326-1351; 1382-1411; 1518-1545; 1543-1568; 1549-1574; 1575-1597; 1621-1643; 1644-1692; 1676-1700; 1712-1734; 1719-1745; 1733-1778; 1733-1760; 1739-1770; 1749-1778; 1829-1856; 1865-1890; 1900-1925; 2076-2098; 2121-2148; 2175-2208; or 2243-2265 of the nucleotide sequence of SEQ ID NO:1, and the antisense strand comprises at least 19 contiguous nucleotides from the corresponding nucleotide sequence of SEQ ID NO:2.

[0011] In one aspect, the present invention provides a double stranded ribonucleic acid (dsRNA) agent for inhibiting expression of Patatin-Like Phospholipase Domain Containing 3 (PNPLA3) in a cell, wherein said dsRNA agent comprises a sense strand and an antisense strand forming a double stranded region, wherein the sense strand comprises at least 15, e.g., 15, 16, 17, 18, 19, 20, 21, 22, or 23 contiguous nucleotides differing by no more than 0, 1, 2, or 3 nucleotides from any one of the nucleotide sequence of nucleotides 687-709, 1182-1204, 1201-1223, 1738-1760, or 2186-2208 of SEQ ID NO: 1, and the antisense strand comprises at least 15 contiguous nucleotides from the corresponding nucleotide sequence of SEQ ID NO:2.

[0012] In some embodiments, the antisense strand comprises at least 15, e.g., 15, 16, 17, 18, 19, or 20, contiguous nucleotides differing by no more than 0, 1, 2, or 3 nucleotides from any one of the antisense strand nucleotide sequences of a duplex selected from the group consisting of AD-1526902.2, AD-1526891.3, AD-1526820.3, AD-1526960.2, and AD-1526996.2.

[0013] In some embodiments, the antisense strand comprises at least 15, e.g., 15, 16, 17, 18, 19, or 20, contiguous nucleotides differing by no more than 0, 1, 2, or 3 nucleotides from any one of the antisense strand nucleotide sequences of a duplex selected from the group consisting of AD-1526902.2, AD-1526891.3, AD-1526820.3, and AD-1526960.2.

[0014] In one embodiment, the dsRNA agent comprises at least one modified nucleotide.

[0015] In one embodiment, substantially all of the nucleotides of the sense strand; substantially all of the nucleotides of the antisense strand are modified nucleotides; or substantially all of the nucleotides of the sense strand and substantially all of the nucleotides of the antisense strand are modified nucleotides.

[0016] In one embodiment, all of the nucleotides of the sense strand are modified nucleotides; all of the nucleotides of the antisense strand are modified nucleotides; or all of the nucleotides of the sense strand and all of the nucleotides of the antisense strand are modified nucleotides.

[0017] In one embodiment, at least one of the modified nucleotides is selected from the group consisting of a deoxy-nucleotide, a 3′-terminal deoxy-thymine (dT) nucleotide, a 2′-O-methyl modified nucleotide, a 2′-fluoro modified nucleotide, a 2′-deoxy-modified nucleotide, a locked nucleotide (LNA), an unlocked nucleotide, a conformationally restricted nucleotide, a constrained ethyl nucleotide, an abasic nucleotide, a 2′-amino-modified nucleotide, a 2′-O-allyl-modified nucleotide, 2′-C-alkyl-modified nucleotide, 2′-hydroxly-modified nucleotide, a 2′-methoxyethyl modified nucleotide, a 2′-O-alkyl-modified nucleotide, a morpholino nucleotide, a phosphoramidate, a non-natural base comprising nucleotide, a tetrahydropyran modified nucleotide, a 1,5-anhydrohexitol modified nucleotide, a cyclohexenyl modified nucleotide, a nucleotide comprising a phosphorothioate group, a nucleotide comprising a methylphosphonate group, a nucleotide comprising a 5′-phosphate, a nucleotide comprising a 5′-phosphate mimic, a thermally destabilizing nucleotide, a glycol modified nucleotide (GNA), a nucleotide with a 2′ phosphate, and a 2-O—(N-methylacetamide) modified nucleotide; and combinations thereof.

[0018] In one embodiment, the modified nucleotides are selected from the group consisting of LNA modified nucleotides, 1,5-anhydrohexitol (HNA) modified nucleotides, cyclohexenyl (CeNA) modified nucleotides, 2′-methoxyethyl modified nucleotides, 2′-O-alkyl modified nucleotides, 2′-O-allyl modified nucleotides, 2′-C-allyl modified nucleotides, 2′-fluoro modified nucleotides, 2′-deoxy modified nucleotides, 2′-hydroxyl modified nucleotides, 2′-O-methyl modified nucleotides, 2′-halo modified nucleotides, and glycol modified nucleotides; and combinations thereof.

[0019] In one embodiment, at least one of the modified nucleotides is selected from the group consisting of a deoxy-nucleotide, a 2′-O-methyl modified nucleotide, a 2′-fluoro modified nucleotide, a 2′-deoxy-modified nucleotide, a glycol modified nucleotide (GNA), e.g., Ggn, Cgn, Tgn, or Agn, a nucleotide comprising a 2′ phosphate, e.g., G2p, C2p, A2p, U2p, and a vinyl-phosphonate nucleotide; and combinations thereof.

[0020] In another embodiment, at least one of the modified nucleotides is a thermally destabilizing nucleotide modification.

[0021] In one embodiment, the thermally destabilizing nucleotide modification is selected from the group consisting of an abasic modification; a mismatch with the opposing nucleotide in the duplex; and destabilizing sugar modification, a 2′-deoxy modification, an acyclic nucleotide, an unlocked nucleic acids (UNA), and a glycerol nucleic acid (GNA).

[0022] In some embodiments, the modified nucleotide comprises a short sequence of 3′-terminal deoxy-thymine nucleotides (dT).

[0023] In some embodiments, the modifications on the nucleotides are 2′-O-methyl, GNA and 2′fluoro modifications.

[0024] In some embodiments, the dsRNA agent further comprises at least one phosphorothioate internucleotide linkage. In some embodiments, the dsRNA agent comprises 6-8 phosphorothioate internucleotide linkages. In one embodiment, the phosphorothioate or methylphosphonate internucleotide linkage is at the 3′-terminus of one strand. Optionally, the strand is the antisense strand. In another embodiment, the strand is the sense strand. In a related embodiment, the phosphorothioate or methylphosphonate internucleotide linkage is at the 5′-terminus of one strand. Optionally, the strand is the antisense strand. In another embodiment, the strand is the sense strand. In another embodiment, the phosphorothioate or methylphosphonate internucleotide linkage is at the both the 5′- and 3′-terminus of one strand. Optionally, the strand is the antisense strand. In another embodiment, the strand is the sense strand.

[0025] The double stranded region may be 19-30 nucleotide pairs in length; 19-25 nucleotide pairs in length; 19-23 nucleotide pairs in length; 23-27 nucleotide pairs in length; or 21-23 nucleotide pairs in length; 19, 20, 21 nucleotides in length. The double stranded region may have 0, 1, 2, or 3 mismatches.

[0026] In one embodiment, each strand is independently no more than 30 nucleotides in length.

[0027] In one embodiment, the sense strand is 21 nucleotides in length and the antisense strand is 23 nucleotides in length.

[0028] The region of complementarity may be at least 17 nucleotides in length; between 19 and 23 nucleotides in length; or 19 nucleotides in length.

[0029] In one embodiment, at least one strand comprises a 3′ overhang of at least 1 nucleotide. In another embodiment, at least one strand comprises a 3′ overhang of at least 2 nucleotides.

[0030] In one embodiment, the dsRNA agent further comprises a ligand.

[0031] In one embodiment, the ligand is conjugated to the 3′ end of the sense strand of the dsRNA agent.

[0032] In one embodiment, the ligand comprises an N-acetylgalactosamine (GalNAc) derivative.

[0033] In one embodiment, the ligand is an N-acetylgalactosamine (GalNAc) derivative.

[0034] In one embodiment, the ligand comprises one or more GalNAc derivatives attached through a monovalent, bivalent, or trivalent branched linker.

[0035] In one embodiment, the ligand is one or more GalNAc derivatives attached through a monovalent, bivalent, or trivalent branched linker.

[0036] In one embodiment, the ligand comprises

[chemical structure]

[0037] In one embodiment, the ligand is

[chemical structure]

[0038] In one embodiment, the dsRNA agent is conjugated to the ligand as shown in the following schematic

[chemical structure]

and, wherein X is O or S.

[0039] In one embodiment, the X is O.

[0040] In one embodiment, the dsRNA agent further comprises at least one phosphorothioate or methylphosphonate internucleotide linkage.

[0041] In one embodiment, the phosphorothioate or methylphosphonate internucleotide linkage is at the 3′-terminus of one strand, e.g., the antisense strand or the sense strand.

[0042] In another embodiment, the phosphorothioate or methylphosphonate internucleotide linkage is at the 5′-terminus of one strand, e.g., the antisense strand or the sense strand.

[0043] In one embodiment, the phosphorothioate or methylphosphonate internucleotide linkage is at the both the 5′- and 3′-terminus of one strand. In one embodiment, the strand is the antisense strand.

[0044] In one embodiment, the base pair at the 1 position of the 5′-end of the antisense strand of the duplex is an AU base pair.

[0045] The present invention also provides cells containing any of the dsRNA agents of the invention and pharmaceutical compositions comprising any of the dsRNA agents of the invention.

[0046] The pharmaceutical composition of the invention may include dsRNA agent in an unbuffered solution, e.g., saline or water, or the pharmaceutical composition of the invention may include the dsRNA agent is in a buffer solution, e.g., a buffer solution comprising acetate, citrate, prolamine, carbonate, or phosphate or any combination thereof; or phosphate buffered saline (PBS).

[0047] In one aspect, the present invention provides a method of inhibiting expression of a Patatin-Like Phospholipase Domain Containing 3 (PNPLA3) gene in a cell. The method includes contacting the cell with any of the dsRNAs of the invention or any of the pharmaceutical compositions of the invention, thereby inhibiting expression of the PNPLA3 gene in the cell.

[0048] In one embodiment, the cell is within a subject, e.g., a human subject, e.g., a subject having a Patatin-Like Phospholipase Domain Containing 3 (PNPLA3)-associated disorder, such as a Patatin-Like Phospholipase Domain Containing 3 (PNPLA3)-associated disorder selected from the group consisting of fatty liver (steatosis), nonalcoholic steatohepatitis (NASH), cirrhosis of the liver, accumulation of fat in the liver, inflammation of the liver, hepatocellular necrosis, liver fibrosis, obesity, or nonalcoholic fatty liver disease (NAFLD).

[0049] In one embodiment, contacting the cell with the dsRNA agent inhibits the expression of PNPLA3 by at least 50%, 60%, 70%, 80%, 90%, or 95%.

[0050] In one embodiment, inhibiting expression of PNPLA3 decreases PNPLA3 protein level in serum of the subject by at least 50%, 60%, 70%, 80%, 90%, or 95%.

[0051] In one aspect, the present invention provides a method of treating a subject having a disorder that would benefit from reduction in Patatin-Like Phospholipase Domain Containing 3 (PNPLA3) expression. The method includes administering to the subject a therapeutically effective amount of any of the dsRNAs of the invention or any of the pharmaceutical compositions of the invention, thereby treating the subject having the disorder that would benefit from reduction in PNPLA3 expression.

[0052] In another aspect, the present invention provides a method of preventing at least one symptom in a subject having a disorder that would benefit from reduction in Patatin-Like Phospholipase Domain Containing 3 (PNPLA3) expression. The method includes administering to the subject a prophylactically effective amount of any of the dsRNAs of the invention or any of the pharmaceutical compositions of the invention, thereby preventing at least one symptom in the subject having the disorder that would benefit from reduction in PNPLA3 expression.

[0053] In one embodiment, the disorder is a Patatin-Like Phospholipase Domain Containing 3 (PNPLA3)-associated disorder, e.g., a Patatin-Like Phospholipase Domain Containing 3 (PNPLA3)-associated disorder is selected from the group consisting of fatty liver (steatosis), nonalcoholic steatohepatitis (NASH), cirrhosis of the liver, accumulation of fat in the liver, inflammation of the liver, hepatocellular necrosis, liver fibrosis, obesity, or nonalcoholic fatty liver disease (NAFLD).

[0054] In one embodiment, the PNPLA3-associated disorder is NAFLD.

[0055] In one embodiment, the subject is human.

[0056] In one embodiment, the dsRNA agent is administered to the subject at a dose of about 0.01 mg/kg to about 50 mg/kg.

[0057] In one embodiment, the dsRNA agent is administered to the subject subcutaneously.

[0058] In one embodiment, the methods of the invention include further determining the level of PNPLA3 in a sample(s) from the subject.

[0059] In one embodiment, the level of Patatin-Like Phospholipase Domain Containing 3 (PNPLA3) in the subject sample(s) is a Patatin-Like Phospholipase Domain Containing 3 (PNPLA3) protein level in a blood or serum sample(s).

[0060] In certain embodiments, the methods of the invention further comprise administering to the subject an additional therapeutic agent. In a further embodiment, the additional therapeutic agent is selected from the group consisting of an HMG-CoA reductase inhibitor, a fibrate, a bile acid sequestrant, niacin, an antiplatelet agent, an angiotensin converting enzyme inhibitor, an angiotensin II receptor antagonist, an acylCoA cholesterol acetyltransferase (ACAT) inhibitor, a cholesterol absorption inhibitor, a cholesterol ester transfer protein (CETP) inhibitor, a microsomal triglyceride transfer protein (MTTP) inhibitor, a cholesterol modulator, a bile acid modulator, a peroxisome proliferation activated receptor (PPAR) agonist, a gene-based therapy, a composite vascular protectant, a glycoprotein Ilb/IIIa inhibitor, aspirin or an aspirin-like compound, an IBAT inhibitor, a squalene synthase inhibitor, a monocyte chemoattractant protein (MCP)-I inhibitor, or fish oil.

[0061] The present invention also provides kits comprising any of the dsRNAs of the invention or any of the pharmaceutical compositions of the invention, and optionally, instructions for use.

[0062] The present invention is further illustrated by the following detailed description and drawings.

### BRIEF DESCRIPTION OF THE DRAWINGS

[0063] FIG. 1 is a schematic depicting the overall study design for the in vivo screening of the dsRNA agents targeting human PNPLA3.

[0064] FIG. 2 is a graph showing human PNPLA3 mRNA levels in mice (n=3 per group) subcutaneously administered a single 10 mg/kg dose of the indicated dsRNA duplexes, on day 14 post-dose. Human PNPLA3 mRNA levels are shown relative to control levels detected with PBS treatment.

### DETAILED DESCRIPTION OF THE INVENTION

[0065] The present invention provides iRNA compositions which effect the RNA-induced silencing complex (RISC)-mediated cleavage of RNA transcripts of a Patatin-Like Phospholipase Domain Containing 3 (PNPLA3) gene. The gene may be within a cell, e.g., a cell within a subject, such as a human. The use of these iRNAs enables the targeted degradation of mRNAs of the corresponding gene (Patatin-Like Phospholipase Domain Containing 3 (PNPLA3) gene) in mammals.

[0066] The iRNAs of the invention have been designed to target the human Patatin-Like Phospholipase Domain Containing 3 (PNPLA3) gene, including portions of the gene that are conserved in the Patatin-Like Phospholipase Domain Containing 3 (PNPLA3) orthologs of other mammalian species. Without intending to be limited by theory, it is believed that a combination or sub-combination of the foregoing properties and the specific target sites or the specific modifications in these iRNAs confer to the iRNAs of the invention improved efficacy, stability, potency, durability, and safety.

[0067] Accordingly, the present invention provides methods for treating and preventing an Patatin-Like Phospholipase Domain Containing 3 (PNPLA3)-associated disorder, e.g., fatty liver (steatosis), nonalcoholic steatohepatitis (NASH), cirrhosis of the liver, accumulation of fat in the liver, inflammation of the liver, hepatocellular necrosis, liver fibrosis, obesity, or nonalcoholic fatty liver disease (NAFLD), using iRNA compositions which effect the RNA-induced silencing complex (RISC)-mediated cleavage of RNA transcripts of a PNPLA3 gene.

[0068] The iRNAs of the invention include an RNA strand (the antisense strand) having a region which is up to about 30 nucleotides or less in length, e.g., 19-30, 19-29, 19-28, 19-27, 19-26, 19-25, 19-24, 19-23, 19-22, 19-21, 19-20, 20-30, 20-29, 20-28, 20-27, 20-26, 20-25, 20-24, 20-23, 20-22, 20-21, 21-30, 21-29, 21-28, 21-27, 21-26, 21-25, 21-24, 21-23, or 21-22 nucleotides in length, which region is substantially complementary to at least part of an mRNA transcript of an PNPLA3 gene.

[0069] In certain embodiments, one or both of the strands of the double stranded RNAi agents of the invention is up to 66 nucleotides in length, e.g., 36-66, 26-36, 25-36, 31-60, 22-43, 27-53 nucleotides in length, with a region of at least 19 contiguous nucleotides that is substantially complementary to at least a part of an mRNA transcript of an PNPLA3 gene. In some embodiments, such iRNA agents having longer length antisense strands preferably may include a second RNA strand (the sense strand) of 20-60 nucleotides in length wherein the sense and antisense strands form a duplex of 18-30 contiguous nucleotides.

[0070] The use of iRNAs of the invention enables the targeted degradation of mRNAs of the corresponding gene (PNPLA3 gene) in mammals. Using in vitro assays, the present inventors have demonstrated that iRNAs targeting a PNPLA3 gene can potently mediate RNAi, resulting in significant inhibition of expression of a PNPLA3 gene. Thus, methods and compositions including these iRNAs are useful for treating a subject having a PNPLA3-associated disorder, e.g., fatty liver (steatosis), nonalcoholic steatohepatitis (NASH), cirrhosis of the liver, accumulation of fat in the liver, inflammation of the liver, hepatocellular necrosis, liver fibrosis, obesity, or nonalcoholic fatty liver disease (NAFLD).

[0071] Accordingly, the present invention provides methods and combination therapies for treating a subject having a disorder that would benefit from inhibiting or reducing the expression of an PNPLA3 gene, e.g., a Patatin-Like Phospholipase Domain Containing 3 (PNPLA3)-associated disease, such as fatty liver (steatosis), nonalcoholic steatohepatitis (NASH), cirrhosis of the liver, accumulation of fat in the liver, inflammation of the liver, hepatocellular necrosis, liver fibrosis, obesity, or nonalcoholic fatty liver disease (NAFLD), using iRNA compositions which effect the RNA-induced silencing complex (RISC)-mediated cleavage of RNA transcripts of an PNPLA3 gene.

[0072] The present invention also provides methods for preventing at least one symptom in a subject having a disorder that would benefit from inhibiting or reducing the expression of a PNPLA3 gene, e.g., fatty liver (steatosis), nonalcoholic steatohepatitis (NASH), cirrhosis of the liver, accumulation of fat in the liver, inflammation of the liver, hepatocellular necrosis, liver fibrosis, obesity, or nonalcoholic fatty liver disease (NAFLD). For example, in a subject having NAFLLD, the methods of the present invention may reduce at least one symptom in the subject, e.g., fatigue, weakness, weight loss, loss of apetite, nausea, abdominal pain, spider-like blood vessels, yellowing of the skin and eyes (jaundice), itching, fluid build up and swelling of the legs (edema), abdomen swelling (ascites), and mental confusion.

[0073] The following detailed description discloses how to make and use compositions containing iRNAs to inhibit the expression of a PNPLA3 gene as well as compositions, uses, and methods for treating subjects that would benefit from inhibition and/or reduction of the expression of a PNPLA3 gene, e.g., subjects susceptible to or diagnosed with a PNPLA3-associated disorder.

### I. Definitions

[0074] In order that the present invention may be more readily understood, certain terms are first defined. In addition, it should be noted that whenever a value or range of values of a parameter are recited, it is intended that values and ranges intermediate to the recited values are also intended to be part of this invention.

[0075] The articles “a” and “an” are used herein to refer to one or to more than one (i.e., to at least one) of the grammatical object of the article. By way of example, “an element” means one element or more than one element, e.g., a plurality of elements.

[0076] The term “including” is used herein to mean, and is used interchangeably with, the phrase “including but not limited to”.

[0077] The term “or” is used herein to mean, and is used interchangeably with, the term “and/or,” unless context clearly indicates otherwise. For example, “sense strand or antisense strand” is understood as “sense strand or antisense strand or sense strand and antisense strand.”

[0078] The term “about” is used herein to mean within the typical ranges of tolerances in the art. For example, “about” can be understood as about 2 standard deviations from the mean. In certain embodiments, about means ±10%. In certain embodiments, about means ±5%. When about is present before a series of numbers or a range, it is understood that “about” can modify each of the numbers in the series or range.

[0079] The term “at least” prior to a number or series of numbers is understood to include the number adjacent to the term “at least”, and all subsequent numbers or integers that could logically be included, as clear from context. For example, the number of nucleotides in a nucleic acid molecule must be an integer. For example, “at least 19 nucleotides of a 21 nucleotide nucleic acid molecule” means that 19, 20, or 21 nucleotides have the indicated property. When at least is present before a series of numbers or a range, it is understood that “at least” can modify each of the numbers in the series or range.

[0080] As used herein, “no more than” or “less than” is understood as the value adjacent to the phrase and logical lower values or integers, as logical from context, to zero. For example, a duplex with an overhang of “no more than 2 nucleotides” has a 2, 1, or 0 nucleotide overhang. When “no more than” is present before a series of numbers or a range, it is understood that “no more than” can modify each of the numbers in the series or range. As used herein, ranges include both the upper and lower limit.

[0081] As used herein, methods of detection can include determination that the amount of analyte present is below the level of detection of the method.

[0082] In the event of a conflict between an indicated target site and the nucleotide sequence for a sense or antisense strand, the indicated sequence takes precedence.

[0083] In the event of a conflict between a sequence and its indicated site on a transcript or other sequence, the nucleotide sequence recited in the specification takes precedence.

[0084] As used herein, “Patatin-Like Phospholipase Domain Containing 3,” used interchangeably with the term “PNPLA3,” refers to the well-known gene that encodes a triacylglycerol lipase that mediates triacyl glycerol hydrolysis in adipocytes.

[0085] Exemplary nucleotide and amino acid sequences of PNPLA3 can be found, for example, at GenBank Accession No. NM_025225.2 (Homo sapiens PNPLA3; SEQ ID NO:1; reverse complement, SEQ ID NO:2); GenBank Accession No. NM_054088.3 (Mus musculus PNPLA3; SEQ ID NO:3; reverse complement, SEQ ID NO:4); GenBank Accession No. NM_001282324.1 (Rattus norvegicus PNPLA3; SEQ ID NO:5; reverse complement, SEQ ID NO:6); GenBank Accession No. XM_005567051.1 (Macaca fascicularis PNPLA3, SEQ ID NO:7; reverse complement, SEQ ID NO:8); GenBank Accession No. XM_001109144.2 (Macaca mulatta PNPLA3, SEQ ID NO:9; reverse complement, SEQ ID NO:10); and GenBank Accession No. XM_005567052.1 (Macaca fascicularis PNPLA3, SEQ ID NO:11; reverse complement, SEQ ID NO:12).

[0086] Additional examples of PNPLA3 mRNA sequences are readily available through publicly available databases, e.g., GenBank, UniProt, OMIM, and the Macaca genome project web site.

[0087] Further information on PNPLA3 can be found, for example, at www.ncbi.nlm.nih.gov/gene/?term=pnpla3.

[0088] The entire contents of each of the foregoing GenBank Accession numbers and the Gene database numbers are incorporated herein by reference as of the date of filing this application.

[0089] The term PNPLA3, as used herein, also refers to variations of the PNPLA3 gene including variants provided in the SNP database. Numerous sequence variations within the PNPLA3 gene have been identified and may be found at, for example, NCBI dbSNP and UniProt (see, e.g., www.ncbi.nlm.nih.gov/snp/?term=pnpla3, the entire contents of which is incorporated herein by reference as of the date of filing this application.

[0090] As used herein, “target sequence” refers to a contiguous portion of the nucleotide sequence of an mRNA molecule formed during the transcription of a PNPLA3 gene, including mRNA that is a product of RNA processing of a primary transcription product. The target portion of the sequence will be at least long enough to serve as a substrate for iRNA-directed cleavage at or near that portion of the nucleotide sequence of an mRNA molecule formed during the transcription of a PNPLA3 gene.

[0091] In one embodiment, the target sequence is within the protein coding region of PNPLA3. It is understood that if the nucleotide sequence of a target sequence is provided as, e.g., a cDNA sequence or the reverse complement of a cDNA sequence, e.g., SEQ ID NOs:1-12, the “Ts” are “Us” in the corresponding mRNA sequence.

[0092] The target sequence may be from about 19-36 nucleotides in length, e.g., preferably about 19-30 nucleotides in length. For example, the target sequence can be about 19-30 nucleotides, 19-30, 19-29, 19-28, 19-27, 19-26, 19-25, 19-24, 19-23, 19-22, 19-21, 19-20, 20-30, 20-29, 20-28, 20-27, 20-26, 20-25, 20-24, 20-23, 20-22, 20-21, 21-30, 21-29, 21-28, 21-27, 21-26, 21-25, 21-24, 21-23, or 21-22 nucleotides in length. In certain embodiments, the target sequence is 19-23 nucleotides in length, optionally 21-23 nucleotides in length. Ranges and lengths intermediate to the above recited ranges and lengths are also contemplated to be part of the disclosure.

[0093] As used herein, the term “strand comprising a sequence” refers to an oligonucleotide comprising a chain of nucleotides that is described by the sequence referred to using the standard nucleotide nomenclature.

[0094] “G,” “C,” “A,” “T,” and “U” each generally stand for a nucleotide that contains guanine, cytosine, adenine, thymidine, and uracil as a base, respectively. However, it will be understood that the term “ribonucleotide” or “nucleotide” can also refer to a modified nucleotide, as further detailed below, or a surrogate replacement moiety (see, e.g., Table 1). The skilled person is well aware that guanine, cytosine, adenine, and uracil can be replaced by other moieties without substantially altering the base pairing properties of an oligonucleotide comprising a nucleotide bearing such replacement moiety. For example, without limitation, a nucleotide comprising inosine as its base can base pair with nucleotides containing adenine, cytosine, or uracil. Hence, nucleotides containing uracil, guanine, or adenine can be replaced in the nucleotide sequences of dsRNA featured in the invention by a nucleotide containing, for example, inosine. In another example, adenine and cytosine anywhere in the oligonucleotide can be replaced with guanine and uracil, respectively to form G-U Wobble base pairing with the target mRNA. Sequences containing such replacement moieties are suitable for the compositions and methods featured in the invention.

[0095] The terms “iRNA”, “RNAi agent,” “iRNA agent,”, “RNA interference agent” as used interchangeably herein, refer to an agent that contains RNA as that term is defined herein, and which mediates the targeted cleavage of an RNA transcript via an RNA-induced silencing complex (RISC) pathway. iRNA directs the sequence-specific degradation of mRNA through a process known as RNA interference (RNAi). The iRNA modulates, e.g., inhibits, the expression of a PNPLA3 gene in a cell, e.g., a cell within a subject, such as a mammalian subject.

[0096] In one embodiment, an RNAi agent of the invention includes a single stranded RNA that interacts with a target RNA sequence, e.g., a PNPLA3 target mRNA sequence, to direct the cleavage of the target RNA. Without wishing to be bound by theory it is believed that long double stranded RNA introduced into cells is broken down into siRNA by a Type III endonuclease known as Dicer (Sharp et al. (2001) Genes Dev. 15:485). Dicer, a ribonuclease-III-like enzyme, processes the dsRNA into 19-23 base pair short interfering RNAs with characteristic two base 3′ overhangs (Bernstein, et al., (2001) Nature 409:363). The siRNAs are then incorporated into an RNA-induced silencing complex (RISC) where one or more helicases unwind the siRNA duplex, enabling the complementary antisense strand to guide target recognition (Nykanen, et al., (2001) Cell 107:309). Upon binding to the appropriate target mRNA, one or more endonucleases within the RISC cleave the target to induce silencing (Elbashir, et al., (2001) Genes Dev. 15:188). Thus, in one aspect the invention relates to a single stranded RNA (siRNA) generated within a cell and which promotes the formation of a RISC complex to effect silencing of the target gene, i.e., a PNPLA3 gene. Accordingly, the term “siRNA” is also used herein to refer to an iRNA as described above.

[0097] In certain embodiments, the RNAi agent may be a single-stranded siRNA (ssRNAi) that is introduced into a cell or organism to inhibit a target mRNA. Single-stranded RNAi agents bind to the RISC endonuclease, Argonaute 2, which then cleaves the target mRNA. The single-stranded siRNAs are generally 15-30 nucleotides and are chemically modified. The design and testing of single-stranded siRNAs are described in U.S. Pat. No. 8,101,348 and in Lima et al., (2012) Cell 150:883-894, the entire contents of each of which are hereby incorporated herein by reference. Any of the antisense nucleotide sequences described herein may be used as a single-stranded siRNA as described herein or as chemically modified by the methods described in Lima et al., (2012) Cell 150:883-894.

[0098] In certain embodiments, an “iRNA” for use in the compositions, uses, and methods of the invention is a double stranded RNA and is referred to herein as a “double stranded RNA agent,” “double stranded RNA (dsRNA) molecule,” “dsRNA agent,” or “dsRNA”. The term “dsRNA”, refers to a complex of ribonucleic acid molecules, having a duplex structure comprising two anti-parallel and substantially complementary nucleic acid strands, referred to as having “sense” and “antisense” orientations with respect to a target RNA, i.e., a PNPLA3 gene. In some embodiments of the invention, a double stranded RNA (dsRNA) triggers the degradation of a target RNA, e.g., an mRNA, through a post-transcriptional gene-silencing mechanism referred to herein as RNA interference or RNAi.

[0099] In general, the majority of nucleotides of each strand of a dsRNA molecule are ribonucleotides, but as described in detail herein, each or both strands can also include one or more non-ribonucleotides, e.g., a deoxyribonucleotide or a modified nucleotide. In addition, as used in this specification, an “iRNA” may include ribonucleotides with chemical modifications; an iRNA may include substantial modifications at multiple nucleotides. As used herein, the term “modified nucleotide” refers to a nucleotide having, independently, a modified sugar moiety, a modified internucleotide linkage, or modified nucleobase, or any combination thereof. Thus, the term modified nucleotide encompasses substitutions, additions or removal of, e.g., a functional group or atom, to internucleoside linkages, sugar moieties, or nucleobases. The modifications suitable for use in the agents of the invention include all types of modifications disclosed herein or known in the art. Any such modifications, as used in a siRNA type molecule, are encompassed by “iRNA” or “RNAi agent” for the purposes of this specification and claims.

[0100] In certain embodiments of the instant disclosure, inclusion of a deoxy-nucleotide if present within an RNAi agent can be considered to constitute a modified nucleotide.

[0101] The duplex region may be of any length that permits specific degradation of a desired target RNA through a RISC pathway, and may range from about 19 to 36 base pairs in length, e.g., about 19-30 base pairs in length, for example, about 9, 10, 11, 12, 13, 14, 15, 16, 17, 18, 19, 20, 21, 22, 23, 24, 25, 26, 27, 28, 29, 30, 31, 32, 33, 34, 35, or 36 base pairs in length, such as about 19-30, 19-29, 19-28, 19-27, 19-26, 19-25, 19-24, 19-23, 19-22, 19-21, 19-20, 20-30, 20-29, 20-28, 20-27, 20-26, 20-25, 20-24, 20-23, 20-22, 20-21, 21-30, 21-29, 21-28, 21-27, 21-26, 21-25, 21-24, 21-23, or 21-22 base pairs in length. In certain embodiments, the duplex region is 19-21 base pairs in length, e.g., 21 base pairs in length. Ranges and lengths intermediate to the above recited ranges and lengths are also contemplated to be part of the disclosure.

[0102] The two strands forming the duplex structure may be different portions of one larger RNA molecule, or they may be separate RNA molecules. Where the two strands are part of one larger molecule, and therefore are connected by an uninterrupted chain of nucleotides between the 3′-end of one strand and the 5′-end of the respective other strand forming the duplex structure, the connecting RNA chain is referred to as a “hairpin loop.” A hairpin loop can comprise at least one unpaired nucleotide. In some embodiments, the hairpin loop can comprise at least 2, 3, 4, 5, 6, 7, 8, 9, 10, 20, 23 or more unpaired nucleotides. In some embodiments, the hairpin loop can be 10 or fewer nucleotides. In some embodiments, the hairpin loop can be 8 or fewer unpaired nucleotides. In some embodiments, the hairpin loop can be 4-10 unpaired nucleotides. In some embodiments, the hairpin loop can be 4-8 nucleotides.

[0103] Where the two substantially complementary strands of a dsRNA are comprised by separate RNA molecules, those molecules need not be, but can be covalently connected. Where the two strands are connected covalently by means other than an uninterrupted chain of nucleotides between the 3′-end of one strand and the 5′-end of the respective other strand forming the duplex structure, the connecting structure is referred to as a “linker.” The RNA strands may have the same or a different number of nucleotides. The maximum number of base pairs is the number of nucleotides in the shortest strand of the dsRNA minus any overhangs that are present in the duplex. In addition to the duplex structure, an RNAi may comprise one or more nucleotide overhangs. In one embodiment of the RNAi agent, at least one strand comprises a 3′ overhang of at least 1 nucleotide. In another embodiment, at least one strand comprises a 3′ overhang of at least 2 nucleotides, e.g., 2, 3, 4, 5, 6, 7, 9, 10, 11, 12, 13, 14, or 15 nucleotides. In other embodiments, at least one strand of the RNAi agent comprises a 5′ overhang of at least 1 nucleotide. In certain embodiments, at least one strand comprises a 5′ overhang of at least 2 nucleotides, e.g., 2, 3, 4, 5, 6, 7, 9, 10, 11, 12, 13, 14, or 15 nucleotides. In still other embodiments, both the 3′ and the 5′ end of one strand of the RNAi agent comprise an overhang of at least 1 nucleotide.

[0104] In certain embodiments, an iRNA agent of the invention is a dsRNA, each strand of which comprises 19-23 nucleotides, that interacts with a target RNA sequence, e.g., a PNPLA3 gene, to direct cleavage of the target RNA.

[0105] In some embodiments, an iRNA of the invention is a dsRNA of 24-30 nucleotides that interacts with a target RNA sequence, e.g., a PNPLA3 target mRNA sequence, to direct the cleavage of the target RNA.

[0106] As used herein, the term “nucleotide overhang” refers to at least one unpaired nucleotide that protrudes from the duplex structure of a double stranded iRNA. For example, when a 3-end of one strand of a dsRNA extends beyond the 5-end of the other strand, or vice versa, there is a nucleotide overhang. A dsRNA can comprise an overhang of at least one nucleotide; alternatively the overhang can comprise at least two nucleotides, at least three nucleotides, at least four nucleotides, at least five nucleotides or more. A nucleotide overhang can comprise or consist of a nucleotide/nucleoside analog, including a deoxynucleotide/nucleoside. The overhang(s) can be on the sense strand, the antisense strand, or any combination thereof. Furthermore, the nucleotide(s) of an overhang can be present on the 5-end, 3-end, or both ends of either an antisense or sense strand of a dsRNA.

[0107] In one embodiment, the antisense strand of a dsRNA has a 1-10 nucleotide, e.g., a 1, 2, 3, 4, 5, 6, 7, 8, 9, or 10 nucleotide, overhang at the 3′-end or the 5′-end. In one embodiment, the sense strand of a dsRNA has a 1-10 nucleotide, e.g., a 1, 2, 3, 4, 5, 6, 7, 8, 9, or 10 nucleotide, overhang at the 3′-end or the 5′-end. In another embodiment, one or more of the nucleotides in the overhang is replaced with a nucleoside thiophosphate.

[0108] In certain embodiments, the antisense strand of a dsRNA has a 1-10 nucleotide, e.g., 0-3, 1-3, 2-4, 2-5, 4-10, 5-10, e.g., a 1, 2, 3, 4, 5, 6, 7, 8, 9, or 10 nucleotide, overhang at the 3′-end or the 5′-end. In one embodiment, the sense strand of a dsRNA has a 1-10 nucleotide, e.g., a 1, 2, 3, 4, 5, 6, 7, 8, 9, or 10 nucleotide, overhang at the 3′-end or the 5′-end. In another embodiment, one or more of the nucleotides in the overhang is replaced with a nucleoside thiophosphate.

[0109] In certain embodiments, the antisense strand of a dsRNA has a 1-10 nucleotides, e.g., a 1, 2, 3, 4, 5, 6, 7, 8, 9, or 10 nucleotide, overhang at the 3′-end or the 5′-end. In certain embodiments, the overhang on the sense strand or the antisense strand, or both, can include extended lengths longer than 10 nucleotides, e.g., 1-30 nucleotides, 2-30 nucleotides, 10-30 nucleotides, 10-25 nucleotides, 10-20 nucleotides, or 10-15 nucleotides in length. In certain embodiments, an extended overhang is on the sense strand of the duplex. In certain embodiments, an extended overhang is present on the 3′ end of the sense strand of the duplex. In certain embodiments, an extended overhang is present on the 5′ end of the sense strand of the duplex. In certain embodiments, an extended overhang is on the antisense strand of the duplex. In certain embodiments, an extended overhang is present on the 3′end of the antisense strand of the duplex. In certain embodiments, an extended overhang is present on the 5′end of the antisense strand of the duplex. In certain embodiments, one or more of the nucleotides in the extended overhang is replaced with a nucleoside thiophosphate. In certain embodiments, the overhang includes a self-complementary portion such that the overhang is capable of forming a hairpin structure that is stable under physiological conditions.

[0110] “Blunt” or “blunt end” means that there are no unpaired nucleotides at that end of the double stranded RNA agent, i.e., no nucleotide overhang. A “blunt ended” double stranded RNA agent is double stranded over its entire length, i.e., no nucleotide overhang at either end of the molecule. The RNAi agents of the invention include RNAi agents with no nucleotide overhang at one end (i.e., agents with one overhang and one blunt end) or with no nucleotide overhangs at either end. Most often such a molecule will be double-stranded over its entire length.

[0111] The term “antisense strand” or “guide strand” refers to the strand of an iRNA, e.g., a dsRNA, which includes a region that is substantially complementary to a target sequence, e.g., a PNPLA3 mRNA.

[0112] As used herein, the term “region of complementarity” refers to the region on the antisense strand that is substantially complementary to a sequence, for example a target sequence, e.g., a PNPLA3 nucleotide sequence, as defined herein. Where the region of complementarity is not fully complementary to the target sequence, the mismatches can be in the internal or terminal regions of the molecule. Generally, the most tolerated mismatches are in the terminal regions, e.g., within 5, 4, or 3 nucleotides of the 5′- or 3′-end of the iRNA. In some embodiments, a double stranded RNA agent of the invention includes a nucleotide mismatch in the antisense strand. In some embodiments, the antisense strand of the double stranded RNA agent of the invention includes no more than 4 mismatches with the target mRNA, e.g., the antisense strand includes 4, 3, 2, 1, or 0 mismatches with the target mRNA. In some embodiments, the antisense strand double stranded RNA agent of the invention includes no more than 4 mismatches with the sense strand, e.g., the antisense strand includes 4, 3, 2, 1, or 0 mismatches with the sense strand. In some embodiments, a double stranded RNA agent of the invention includes a nucleotide mismatch in the sense strand. In some embodiments, the sense strand of the double stranded RNA agent of the invention includes no more than 4 mismatches with the antisense strand, e.g., the sense strand includes 4, 3, 2, 1, or 0 mismatches with the antisense strand. In some embodiments, the nucleotide mismatch is, for example, within 5, 4, 3 nucleotides from the 3′-end of the iRNA. In another embodiment, the nucleotide mismatch is, for example, in the 3′-terminal nucleotide of the iRNA agent. In some embodiments, the mismatch(s) is not in the seed region.

[0113] Thus, an RNAi agent as described herein can contain one or more mismatches to the target sequence. In one embodiment, an RNAi agent as described herein contains no more than 3 mismatches (i.e., 3, 2, 1, or 0 mismatches). In one embodiment, an RNAi agent as described herein contains no more than 2 mismatches. In one embodiment, an RNAi agent as described herein contains no more than 1 mismatch. In one embodiment, an RNAi agent as described herein contains 0 mismatches. In certain embodiments, if the antisense strand of the RNAi agent contains mismatches to the target sequence, the mismatch can optionally be restricted to be within the last 5 nucleotides from either the 5′- or 3′-end of the region of complementarity. For example, in such embodiments, for a 23 nucleotide RNAi agent, the strand which is complementary to a region of a PNPLA3 gene, generally does not contain any mismatch within the central 13 nucleotides. The methods described herein or methods known in the art can be used to determine whether an RNAi agent containing a mismatch to a target sequence is effective in inhibiting the expression of a PNPLA3 gene. Consideration of the efficacy of RNAi agents with mismatches in inhibiting expression of a PNPLA3 gene is important, especially if the particular region of complementarity in a PNPLA3 gene is known to have polymorphic sequence variation within the population.

[0114] The term “sense strand” or “passenger strand” as used herein, refers to the strand of an iRNA that includes a region that is substantially complementary to a region of the antisense strand as that term is defined herein.

[0115] As used herein, “substantially all of the nucleotides are modified” are largely but not wholly modified and can include not more than 5, 4, 3, 2, or 1 unmodified nucleotides.

[0116] As used herein, the term “cleavage region” refers to a region that is located immediately adjacent to the cleavage site. The cleavage site is the site on the target at which cleavage occurs. In some embodiments, the cleavage region comprises three bases on either end of, and immediately adjacent to, the cleavage site. In some embodiments, the cleavage region comprises two bases on either end of, and immediately adjacent to, the cleavage site. In some embodiments, the cleavage site specifically occurs at the site bound by nucleotides 10 and 11 of the antisense strand, and the cleavage region comprises nucleotides 11, 12 and 13.

[0117] As used herein, and unless otherwise indicated, the term “complementary,” when used to describe a first nucleotide sequence in relation to a second nucleotide sequence, refers to the ability of an oligonucleotide or polynucleotide comprising the first nucleotide sequence to hybridize and form a duplex structure under certain conditions with an oligonucleotide or polynucleotide comprising the second nucleotide sequence, as will be understood by the skilled person. Such conditions can, for example, be stringent conditions, where stringent conditions can include: 400 mM NaCl, 40 mM PIPES pH 6.4, 1 mM EDTA, 50° C. or 70° C. for 12-16 hours followed by washing (see, e.g., “Molecular Cloning: A Laboratory Manual, Sambrook, et al. (1989) Cold Spring Harbor Laboratory Press). Other conditions, such as physiologically relevant conditions as can be encountered inside an organism, can apply. The skilled person will be able to determine the set of conditions most appropriate for a test of complementarity of two sequences in accordance with the ultimate application of the hybridized nucleotides.

[0118] Complementary sequences within an iRNA, e.g., within a dsRNA as described herein, include base-pairing of the oligonucleotide or polynucleotide comprising a first nucleotide sequence to an oligonucleotide or polynucleotide comprising a second nucleotide sequence over the entire length of one or both nucleotide sequences. Such sequences can be referred to as “fully complementary” with respect to each other herein. However, where a first sequence is referred to as “substantially complementary” with respect to a second sequence herein, the two sequences can be fully complementary, or they can form one or more, but generally not more than 5, 4, 3, or 2 mismatched base pairs upon hybridization for a duplex up to 30 base pairs, while retaining the ability to hybridize under the conditions most relevant to their ultimate application, e.g., inhibition of gene expression via a RISC pathway. However, where two oligonucleotides are designed to form, upon hybridization, one or more single stranded overhangs, such overhangs shall not be regarded as mismatches with regard to the determination of complementarity. For example, a dsRNA comprising one oligonucleotide 21 nucleotides in length and another oligonucleotide 23 nucleotides in length, wherein the longer oligonucleotide comprises a sequence of 21 nucleotides that is fully complementary to the shorter oligonucleotide, can yet be referred to as “fully complementary” for the purposes described herein.

[0119] “Complementary” sequences, as used herein, can also include, or be formed entirely from, non-Watson-Crick base pairs or base pairs formed from non-natural and modified nucleotides, in so far as the above requirements with respect to their ability to hybridize are fulfilled. Such non-Watson-Crick base pairs include, but are not limited to, G:U Wobble or Hoogstein base pairing.

[0120] The terms “complementary,” “fully complementary” and “substantially complementary” herein can be used with respect to the base matching between the sense strand and the antisense strand of a dsRNA, or between the antisense strand of a double stranded RNA agent and a target sequence, as will be understood from the context of their use.

[0121] As used herein, a polynucleotide that is “substantially complementary to at least part of” a messenger RNA (mRNA) refers to a polynucleotide that is substantially complementary to a contiguous portion of the mRNA of interest (e.g., an mRNA encoding a PNPLA3 gene). For example, a polynucleotide is complementary to at least a part of a PNPLA3 mRNA if the sequence is substantially complementary to a non-interrupted portion of an mRNA encoding a PNPLA3 gene.

[0122] Accordingly, in some embodiments, the antisense polynucleotides disclosed herein are fully complementary to the target PNPLA3 sequence. In other embodiments, the antisense polynucleotides disclosed herein are substantially complementary to the target PNPLA3 sequence and comprise a contiguous nucleotide sequence which is at least 80% complementary over its entire length to the equivalent region of the nucleotide sequence of any one of SEQ ID NOs:1, 3, 5, 7, 9, or 11, or a fragment of any one of SEQ ID NOs:1, 3, 5, 7, 9, or 11, such as about 85%, about 90%, about 91%, about 92%, about 93%, about 94%, about 95%, about 96%, about 97%, about 98%, or about 99% complementary.

[0123] In some embodiments, the antisense polynucleotides disclosed herein are substantially complementary to a fragment of a target PNPLA3 sequence and comprise a contiguous nucleotide sequence which is at least 80% complementary over its entire length to a fragment of SEQ ID NO: 1 selected from the group of nucleotides 187-209; 214-238; 219-245; 283-305; 351-379; 361-391; 395-419; 416-439; 472-494; 483-506; 570-598; 618-649; 631-654; 636-659; 640-662; 643-677; 676-710; 740-772; 782-805; 803-825; 810-842; 864-905; 905-927; 910-934; 919-942; 953-983; 1062-1087; 1069-1097; 1078-1108; 1094-112; 1164-1187; 1170-1199; 1180-1212; 1196-1224; 1234-1262; 1259-1297; 1278-1318; 1326-1351; 1382-1411; 1518-1545; 1543-1568; 1549-1574; 1575-1597; 1621-1643; 1644-1692; 1676-1700; 1712-1734; 1719-1745; 1733-1778; 1733-1760; 1739-1770; 1749-1778; 1829-1856; 1865-1890; 1900-1925; 2076-2098; 2121-2148; 2175-2208; or 2243-2265 of SEQ ID NO: 1, such as about 85%, about 90%, about 91%, about 92%, about 93%, about 94%, about 95%, about 96%, about 97%, about 98%, or about 99% complementary.

[0124] In some embodiments, the antisense polynucleotides disclosed herein are substantially complementary to a fragment of a target PNPLA3 sequence and comprise a contiguous nucleotide sequence which is at least 80% complementary over its entire length to a fragment of SEQ ID NO: 1 selected from the group of nucleotides 687-709, 1182-1204, 1201-1223, 1738-1760, or 2186-2208 of SEQ ID NO: 1, such as about 85%, about 90%, about 91%, about 92%, about 93%, about 94%, about 95%, about 96%, about 97%, about 98%, or about 99% complementary. In other embodiments, the antisense polynucleotides disclosed herein are substantially complementary to the target PNPLA3 sequence and comprise a contiguous nucleotide sequence which is at least about 80% complementary over its entire length to any one of the sense strand nucleotide sequences in any one of any one of Tables 2, 3, 6, and 7, or a fragment of any one of the sense strand nucleotide sequences in any one of Tables 2, 3, 6, and 7, such as about 85%, about 90%, about 91%, about 92%, about 93%, about 94%, about 95%, about 96%, about 97%, about 98%, about 99%, or 100% complementary.

[0125] In one embodiment, an RNAi agent of the disclosure includes a sense strand that is substantially complementary to an antisense polynucleotide which, in turn, is the same as a target PNPLA3 sequence, and wherein the sense strand polynucleotide comprises a contiguous nucleotide sequence which is at least about 80% complementary over its entire length to the equivalent region of the nucleotide sequence of SEQ ID NOs: 2, 4, 6, 8, 10, or 12, or a fragment of any one of SEQ ID NOs:2, 4, 6, 8, 10, or 12, such as about 85%, about 90%, about 91%, about 92%, about 93%, about 94%, about 95%, about 96%, about 97%, about 98%, about 99%, or 100% complementary.

[0126] In some embodiments, an iRNA of the invention includes a sense strand that is substantially complementary to an antisense polynucleotide which, in turn, is complementary to a target PNPLA3 sequence, and wherein the sense strand polynucleotide comprises a contiguous nucleotide sequence which is at least about 80% complementary over its entire length to any one of the antisense strand nucleotide sequences in any one of any one of Tables 2, 3, 6, and 7, or a fragment of any one of the antisense strand nucleotide sequences in any one of Tables 2, 3, 6, and 7, such as about 85%, about 90%, about 91%, about 92%, about 93%, about 94%, about 95%, about 96%, about 97%, about 98%, about 99%, or 100% complementary.

[0127] In some embodiments, the sense and antisense strands are selected from any one of duplexes AD-1526902.2, AD-1526891.3, AD-1526820.3, AD-1526960.2, and AD-1526996.2.

[0128] In some embodiments, the sense and antisense strands are selected from any one of duplexes AD-1526902.2, AD-1526891.3, AD-1526820.3, and AD-1526960.2.

[0129] In some embodiments, the sense and antisense strands are selected from duplex AD-1526902.

[0130] In some embodiments, the sense and antisense strands are selected from duplex AD-1526891.

[0131] In some embodiments, the sense and antisense strands are selected from duplex AD-1526820.

[0132] In some embodiments, the sense and antisense strands are selected from duplex AD-1526960.

[0133] In general, an “iRNA” includes ribonucleotides with chemical modifications. Such modifications may include all types of modifications disclosed herein or known in the art. Any such modifications, as used in a dsRNA molecule, are encompassed by “iRNA” for the purposes of this specification and claims.

[0134] In certain embodiments of the instant disclosure, inclusion of a deoxy-nucleotide if present within an RNAi agent can be considered to constitute a modified nucleotide.

[0135] In an aspect of the invention, an agent for use in the methods and compositions of the invention is a single-stranded antisense oligonucleotide molecule that inhibits a target mRNA via an antisense inhibition mechanism. The single-stranded antisense oligonucleotide molecule is complementary to a sequence within the target mRNA. The single-stranded antisense oligonucleotides can inhibit translation in a stoichiometric manner by base pairing to the mRNA and physically obstructing the translation machinery, see Dias, N. et al., (2002) Mol Cancer Ther 1:347-355. The single-stranded antisense oligonucleotide molecule may be about 14 to about 30 nucleotides in length and have a sequence that is complementary to a target sequence. For example, the single-stranded antisense oligonucleotide molecule may comprise a sequence that is at least about 14, 15, 16, 17, 18, 19, 20, or more contiguous nucleotides from any one of the antisense sequences described herein.

[0136] The phrase “contacting a cell with an iRNA,” such as a dsRNA, as used herein, includes contacting a cell by any possible means. Contacting a cell with an iRNA includes contacting a cell in vitro with the iRNA or contacting a cell in vivo with the iRNA. The contacting may be done directly or indirectly. Thus, for example, the iRNA may be put into physical contact with the cell by the individual performing the method, or alternatively, the iRNA may be put into a situation that will permit or cause it to subsequently come into contact with the cell.

[0137] Contacting a cell in vitro may be done, for example, by incubating the cell with the iRNA. Contacting a cell in vivo may be done, for example, by injecting the iRNA into or near the tissue where the cell is located, or by injecting the iRNA into another area, e.g., the bloodstream or the subcutaneous space, such that the agent will subsequently reach the tissue where the cell to be contacted is located. For example, the iRNA may contain or be coupled to a ligand, e.g., GalNAc, that directs the iRNA to a site of interest, e.g., the liver. Combinations of in vitro and in vivo methods of contacting are also possible. For example, a cell may also be contacted in vitro with an iRNA and subsequently transplanted into a subject.

[0138] In certain embodiments, contacting a cell with an iRNA includes “introducing” or “delivering the iRNA into the cell” by facilitating or effecting uptake or absorption into the cell. Absorption or uptake of an iRNA can occur through unaided diffusion or active cellular processes, or by auxiliary agents or devices. Introducing an iRNA into a cell may be in vitro or in vivo. For example, for in vivo introduction, iRNA can be injected into a tissue site or administered systemically. In vitro introduction into a cell includes methods known in the art such as electroporation and lipofection. Further approaches are described herein below or are known in the art.

[0139] The term “lipid nanoparticle” or “LNP” is a vesicle comprising a lipid layer encapsulating a pharmaceutically active molecule, such as a nucleic acid molecule, e.g., an iRNA or a plasmid from which an iRNA is transcribed. LNPs are described in, for example, U.S. Pat. Nos. 6,858,225, 6,815,432, 8,158,601, and 8,058,069, the entire contents of which are hereby incorporated herein by reference.

[0140] As used herein, a “subject” is an animal, such as a mammal, including a primate (such as a human, a non-human primate, e.g., a monkey, and a chimpanzee), a non-primate (such as a cow, a pig, a horse, a goat, a rabbit, a sheep, a hamster, a guinea pig, a cat, a dog, a rat, or a mouse), or a bird that expresses the target gene, either endogenously or heterologously. In an embodiment, the subject is a human, such as a human being treated or assessed for a disease or disorder that would benefit from reduction in PNPLA3 expression; a human at risk for a disease or disorder that would benefit from reduction in PNPLA3 expression; a human having a disease or disorder that would benefit from reduction in PNPLA3 expression; or human being treated for a disease or disorder that would benefit from reduction in PNPLA3 expression as described herein. In some embodiments, the subject is a female human. In other embodiments, the subject is a male human. In one embodiment, the subject is an adult subject. In another embodiment, the subject is a pediatric subject.

[0141] As used herein, the terms “treating” or “treatment” refer to a beneficial or desired result, such as reducing at least one sign or symptom of a PNPLA3-associated disorder in a subject. Treatment also includes a reduction of one or more sign or symptoms associated with unwanted PNPLA3 expression; diminishing the extent of unwanted PNPLA3 activation or stabilization; amelioration or palliation of unwanted PNPLA3 activation or stabilization. “Treatment” can also mean prolonging survival as compared to expected survival in the absence of treatment. The term “lower” in the context of the level of PNPLA3 in a subject or a disease marker or symptom refers to a statistically significant decrease in such level. The decrease can be, for example, at least 10%, 15%, 20%, 25%, 30%, %, 40%, 45%, 50%, 55%, 60%, 65%, 70%, 75%, 80%, 85%, 90%, 95%, or more. In certain embodiments, a decrease is at least 20%. In certain embodiments, the decrease is at least 50% in a disease marker, e.g., protein or gene expression level. “Lower” in the context of the level of PNPLA3 in a subject is preferably down to a level accepted as within the range of normal for an individual without such disorder. In certain embodiments, “lower” is the decrease in the difference between the level of a marker or symptom for a subject suffering from a disease and a level accepted within the range of normal for an individual, e.g., the level of decrease in bodyweight between an obese individual and an individual having a weight accepted within the range of normal.

[0142] As used herein, “prevention” or “preventing,” when used in reference to a disease, disorder or condition thereof, may be treated or ameliorated by a reduction in expression of an PNPLA3 gene, refers to a reduction in the likelihood that a subject will develop a symptom associated with such a disease, disorder, or condition, e.g., a symptom of unwanted or excessive PNPLA3 expression, such as the presence of elevated levels of proteins in the hedgehog signaling pathway, fatty liver (steatosis), nonalcoholic steatohepatitis (NASH), cirrhosis of the liver, accumulation of fat in the liver, inflammation of the liver, hepatocellular necrosis, liver fibrosis, obesity, or nonalcoholic fatty liver disease (NAFLD). The likelihood of developing, e.g., NAFLD, is reduced, for example, when an individual having one or more risk factors for NAFLD either fails to develop NAFLD or develops NAFLD with less severity relative to a population having the same risk factors and not receiving treatment as described herein. The failure to develop a disease, disorder or condition, or the reduction in the development of a symptom associated with such a disease, disorder or condition (e.g., by at least about 10% on a clinically accepted scale for that disease or disorder), or the exhibition of delayed symptoms delayed (e.g., by days, weeks, months or years) is considered effective prevention.

[0143] As used herein, the term “Patatin-Like Phospholipase Domain Containing 3-associated disease” or “PNPLA3-associated disease,” is a disease or disorder that is caused by, or associated with PNPLA3 gene expression or PNPLA3 protein production. The term “PNPLA3-associated disease” includes a disease, disorder or condition that would benefit from a decrease in PNPLA3 gene expression, replication, or protein activity. Non-limiting examples of PNPLA3-associated diseases include, for example, fatty liver (steatosis), nonalcoholic steatohepatitis (NASH), cirrhosis of the liver, accumulation of fat in the liver, inflammation of the liver, hepatocellular necrosis, liver fibrosis, obesity, or nonalcoholic fatty liver disease (NAFLD). In another embodiment, the PNPLA3-associated disease is nonalcoholic fatty liver disease (NAFLD). In another embodiment, the PNPLA3-associated disease is nonalcoholic steatohepatitis (NASH). In another embodiment, the PNPLA3-associated disease is liver cirrhosis. In another embodiment, the PNPLA3-associated disease is insulin resistance. In another embodiment, the PNPLA3-associated disease is not insulin resistance. In one embodiment, the PNPLA3-associated disease is obesity.

[0144] In one embodiment, a PNPLA3-associated disease is nonalcoholic fatty liver disease (NAFLD). As used herein, “nonalcoholic fatty liver disease,” used interchangeably with the term “NAFLD,” refers to a disease defined by the presence of macrovascular steatosis in the presence of less than 20 gm of alcohol ingestion per day. NAFLD is the most common liver disease in the United States, and is commonly associated with insulin resistance/type 2 diabetes mellitus and obesity. NAFLD is manifested by steatosis, steatohepatitis, cirrhosis, and sometimes hepatocellaular carcinoma. For a review of NAFLD, see Tolman and Dalpiaz (2007) Ther. Clin. Risk. Manag., 3(6):1153-1163 the entire contents of which are incorporated herein by reference.

[0145] “Therapeutically effective amount,” as used herein, is intended to include the amount of an RNAi agent that, when administered to a subject having a PNPLA3-associated disease, is sufficient to effect treatment of the disease (e.g., by diminishing, ameliorating, or maintaining the existing disease or one or more symptoms of disease). The “therapeutically effective amount” may vary depending on the RNAi agent, how the agent is administered, the disease and its severity and the history, age, weight, family history, genetic makeup, the types of preceding or concomitant treatments, if any, and other individual characteristics of the subject to be treated.

[0146] “Prophylactically effective amount,” as used herein, is intended to include the amount of an RNAi agent that, when administered to a subject having a PNPLA3-associated disorder, is sufficient to prevent or ameliorate the disease or one or more symptoms of the disease. Ameliorating the disease includes slowing the course of the disease or reducing the severity of later-developing disease. The “prophylactically effective amount” may vary depending on the RNAi agent, how the agent is administered, the degree of risk of disease, and the history, age, weight, family history, genetic makeup, the types of preceding or concomitant treatments, if any, and other individual characteristics of the patient to be treated.

[0147] A “therapeutically-effective amount” or “prophylactically effective amount” also includes an amount of an RNAi agent that produces some desired effect at a reasonable benefit/risk ratio applicable to any treatment. The iRNA employed in the methods of the present invention may be administered in a sufficient amount to produce a reasonable benefit/risk ratio applicable to such treatment.

[0148] The phrase “pharmaceutically acceptable” is employed herein to refer to those compounds, materials, compositions, or dosage forms which are, within the scope of sound medical judgment, suitable for use in contact with the tissues of human subjects and animal subjects without excessive toxicity, irritation, allergic response, or other problem or complication, commensurate with a reasonable benefit/risk ratio.

[0149] The phrase “pharmaceutically-acceptable carrier” as used herein means a pharmaceutically-acceptable material, composition, or vehicle, such as a liquid or solid filler, diluent, excipient, manufacturing aid (e.g., lubricant, talc magnesium, calcium or zinc stearate, or steric acid), or solvent encapsulating material, involved in carrying or transporting the subject compound from one organ, or portion of the body, to another organ, or portion of the body. Each carrier must be “acceptable” in the sense of being compatible with the other ingredients of the formulation and not injurious to the subject being treated. Such carriers are known in the art. Pharmaceutically acceptable carriers include carriers for administration by injection.

[0150] The term “sample,” as used herein, includes a collection of similar fluids, cells, or tissues isolated from a subject, as well as fluids, cells, or tissues present within a subject. Examples of biological fluids include blood, serum and serosal fluids, plasma, cerebrospinal fluid, ocular fluids, lymph, urine, saliva, and the like. Tissue samples may include samples from tissues, organs, or localized regions. For example, samples may be derived from particular organs, parts of organs, or fluids or cells within those organs. In certain embodiments, samples may be derived from the liver (e.g., whole liver or certain segments of liver or certain types of cells in the liver, such as, e.g., hepatocytes). In some embodiments, a “sample derived from a subject” refers to urine obtained from the subject. A “sample derived from a subject” can refer to blood or blood derived serum or plasma from the subject.

### II. iRNAs of the Invention

[0151] The present invention provides iRNAs which inhibit the expression of a PNPLA3 gene. In preferred embodiments, the iRNA includes double stranded ribonucleic acid (dsRNA) molecules for inhibiting the expression of an PNPLA3 gene in a cell, such as a cell within a subject, e.g., a mammal, such as a human susceptible to developing a PNPLA3-associated disorder, e.g., hypertriglyceridemia. The dsRNAi agent includes an antisense strand having a region of complementarity which is complementary to at least a part of an mRNA formed in the expression of a PNPLA3 gene. The region of complementarity is about 19-30 nucleotides in length (e.g., about 30, 29, 28, 27, 26, 25, 24, 23, 22, 21, 20, or 19 nucleotides in length). Upon contact with a cell expressing the PNPLA3 gene, the iRNA inhibits the expression of the PNPLA3 gene (e.g., a human, a primate, a non-primate, or a rat PNPLA3 gene) by at least about 50% as assayed by, for example, a PCR or branched DNA (bDNA)-based method, or by a protein-based method, such as by immunofluorescence analysis, using, for example, western blotting or flow cytometric techniques. In preferred embodiments, inhibition of expression is determined by the qPCR method provided in the examples herein with the siRNA at, e.g., a 10 nM concentration, in an appropriate organism cell line provided therein. In preferred embodiments, inhibition of expression in vivo is determined by knockdown of the human gene in a rodent expressing the human gene, e.g., a mouse or an AAV-infected mouse expressing the human target gene, e.g., when administered as single dose, e.g., at 3 mg/kg at the nadir of RNA expression.

[0152] A dsRNA includes two RNA strands that are complementary and hybridize to form a duplex structure under conditions in which the dsRNA will be used. One strand of a dsRNA (the antisense strand) includes a region of complementarity that is substantially complementary, and generally fully complementary, to a target sequence. The target sequence can be derived from the sequence of an mRNA formed during the expression of a PNPLA3 gene. The other strand (the sense strand) includes a region that is complementary to the antisense strand, such that the two strands hybridize and form a duplex structure when combined under suitable conditions. As described elsewhere herein and as known in the art, the complementary sequences of a dsRNA can also be contained as self-complementary regions of a single nucleic acid molecule, as opposed to being on separate oligonucleotides.

[0153] Generally, the duplex structure is 15 to 30 base pairs in length, e.g., 15-29, 15-28, 15-27, 15-26, 15-25, 15-24, 15-23, 15-22, 15-21, 15-20, 15-19, 15-18, 15-17, 18-30, 18-29, 18-28, 18-27, 18-26, 18-25, 18-24, 18-23, 18-22, 18-21, 18-20, 19-30, 19-29, 19-28, 19-27, 19-26, 19-25, 19-24, 19-23, 19-22, 19-21, 19-20, 20-30, 20-29, 20-28, 20-27, 20-26, 20-25, 20-24, 20-23, 20-22, 20-21, 21-30, 21-29, 21-28, 21-27, 21-26, 21-25, 21-24, 21-23, or 21-22 base pairs in length. In certain preferred embodiments, the duplex structure is 18 to 25 base pairs in length, e.g., 18-25, 18-24, 18-23, 18-22, 18-21, 18-20, 19-25, 19-24, 19-23, 19-22, 19-21, 19-20, 20-25, 20-24, 20-23, 20-22, 20-21, 21-25, 21-24, 21-23, 21-22, 22-25, 22-24, 22-23, 23-25, 23-24 or 24-25 base pairs in length, for example, 19-21 basepairs in length. Ranges and lengths intermediate to the above recited ranges and lengths are also contemplated to be part of the disclosure.

[0154] Similarly, the region of complementarity to the target sequence is 15 to 30 nucleotides in length, e.g., 15-29, 15-28, 15-27, 15-26, 15-25, 15-24, 15-23, 15-22, 15-21, 15-20, 15-19, 15-18, 15-17, 18-30, 18-29, 18-28, 18-27, 18-26, 18-25, 18-24, 18-23, 18-22, 18-21, 18-20, 19-30, 19-29, 19-28, 19-27, 19-26, 19-25, 19-24, 19-23, 19-22, 19-21, 19-20, 20-30, 20-29, 20-28, 20-27, 20-26, 20-25, 20-24,20-23, 20-22, 20-21, 21-30, 21-29, 21-28, 21-27, 21-26, 21-25, 21-24, 21-23, or 21-22 nucleotides in length, for example 19-23 nucleotides in length or 21-23 nucleotides in length. Ranges and lengths intermediate to the above recited ranges and lengths are also contemplated to be part of the disclosure.

[0155] In some embodiments, the duplex structure is 19 to 30 base pairs in length. Similarly, the region of complementarity to the target sequence is 19 to 30 nucleotides in length.

[0156] In some embodiments, the dsRNA is about 19 to about 23 nucleotides in length, or about 25 to about 30 nucleotides in length. In general, the dsRNA is long enough to serve as a substrate for the Dicer enzyme. For example, it is well-known in the art that dsRNAs longer than about 21-23 nucleotides in length may serve as substrates for Dicer. As the ordinarily skilled person will also recognize, the region of an RNA targeted for cleavage will most often be part of a larger RNA molecule, often an mRNA molecule. Where relevant, a “part” of an mRNA target is a contiguous sequence of an mRNA target of sufficient length to allow it to be a substrate for RNAi-directed cleavage (i.e., cleavage through a RISC pathway).

[0157] One of skill in the art will also recognize that the duplex region is a primary functional portion of a dsRNA, e.g., a duplex region of about 19 to about 30 base pairs, e.g., about 19-30, 19-29, 19-28, 19-27, 19-26, 19-25, 19-24, 19-23, 19-22, 19-21, 19-20, 20-30, 20-29, 20-28, 20-27, 20-26, 20-25, 20-24, 20-23, 20-22, 20-21, 21-30, 21-29, 21-28, 21-27, 21-26, 21-25, 21-24, 21-23, or 21-22 base pairs. Thus, in one embodiment, to the extent that it becomes processed to a functional duplex, of e.g., 15-30 base pairs, that targets a desired RNA for cleavage, an RNA molecule or complex of RNA molecules having a duplex region greater than 30 base pairs is a dsRNA. Thus, an ordinarily skilled artisan will recognize that in one embodiment, a miRNA is a dsRNA. In another embodiment, a dsRNA is not a naturally occurring miRNA. In another embodiment, an iRNA agent useful to target PNPLA3 gene expression is not generated in the target cell by cleavage of a larger dsRNA.

[0158] A dsRNA as described herein can further include one or more single-stranded nucleotide overhangs e.g., 1-4, 2-4, 1-3, 2-3, 1, 2, 3, or 4 nucleotides. dsRNAs having at least one nucleotide overhang can have superior inhibitory properties relative to their blunt-ended counterparts. A nucleotide overhang can comprise or consist of a nucleotide/nucleoside analog, including a deoxynucleotide/nucleoside. The overhang(s) can be on the sense strand, the antisense strand, or any combination thereof. Furthermore, the nucleotide(s) of an overhang can be present on the 5′-end, 3′-end, or both ends of an antisense or sense strand of a dsRNA.

[0159] A dsRNA can be synthesized by standard methods known in the art. Double stranded RNAi compounds of the invention may be prepared using a two-step procedure. First, the individual strands of the double stranded RNA molecule are prepared separately. Then, the component strands are annealed. The individual strands of the siRNA compound can be prepared using solution-phase or solid-phase organic synthesis or both. Organic synthesis offers the advantage that the oligonucleotide strands comprising unnatural or modified nucleotides can be easily prepared. Similarly, single-stranded oligonucleotides of the invention can be prepared using solution-phase or solid-phase organic synthesis or both.

[0160] In an aspect, a dsRNA of the invention includes at least two nucleotide sequences, a sense sequence and an anti-sense sequence. The sense strand is selected from the group of sequences provided in any one of Tables 2, 3, 6, and 7, and the corresponding antisense strand of the sense strand is selected from the group of sequences of any one of Tables 2, 3, 6, and 73. In this aspect, one of the two sequences is complementary to the other of the two sequences, with one of the sequences being substantially complementary to a sequence of an mRNA generated in the expression of a PNPLA3 gene. As such, in this aspect, a dsRNA will include two oligonucleotides, where one oligonucleotide is described as the sense strand in any one of Tables 2, 3, 6, and 7, and the second oligonucleotide is described as the corresponding antisense strand of the sense strand in any one of Tables 2, 3, 6, and 7.

[0161] In certain embodiments, the substantially complementary sequences of the dsRNA are contained on separate oligonucleotides. In other embodiments, the substantially complementary sequences of the dsRNA are contained on a single oligonucleotide.

[0162] In some embodiments, the sense or antisense strand is selected from the sense or antisense strand of any one of duplexes AD-1526902.2, AD-1526891.3, AD-1526820.3, AD-1526960.2, and AD-1526996.2.

[0163] In some embodiments, the sense or antisense strand is selected from the sense or antisense strand of any one of duplexes AD-1526902.2, AD-1526891.3, AD-1526820.3, and AD-1526960.2.

[0164] In some embodiments, the sense or antisense strand is selected from the sense or antisense strand of duplex AD-1526902.

[0165] In some embodiments, the sense or antisense strand is selected from the sense or antisense strand of duplex AD-1526891.

[0166] In some embodiments, the sense or antisense strand is selected from the sense or antisense strand of duplex AD-1526820.

[0167] In some embodiments, the sense or antisense strand is selected from the sense or antisense strand of duplex AD-1526960.

[0168] It will be understood that, although the sequences in, for example, Table 3, are not described as modified or conjugated sequences, the RNA of the iRNA of the invention e.g., a dsRNA of the invention, may comprise any one of the sequences set forth in any one of Tables 2, 3, 6, and 7 that is un-modified, un-conjugated, or modified or conjugated differently than described therein. In other words, the invention encompasses dsRNA of Tables 2, 3, 6, and 7 which are un-modified, un-conjugated, modified, or conjugated, as described herein.

[0169] The skilled person is well aware that dsRNAs having a duplex structure of about 20 to 23 base pairs, e.g., 21, base pairs have been hailed as particularly effective in inducing RNA interference (Elbashir et al., EMBO 2001, 20:6877-6888). However, others have found that shorter or longer RNA duplex structures can also be effective (Chu and Rana (2007) RNA 14:1714-1719; Kim et al. (2005) Nat Biotech 23:222-226). In the embodiments described above, by virtue of the nature of the oligonucleotide sequences provided in any one of Tables 2, 3, 6, and 7. dsRNAs described herein can include at least one strand of a length of minimally 21 nucleotides. It can be reasonably expected that shorter duplexes having any one of the sequences in any one of Tables 2, 3, 6, and 7 minus only a few nucleotides on one or both ends can be similarly effective as compared to the dsRNAs described above. Hence, dsRNAs having a sequence of at least 19, 20, or more contiguous nucleotides derived from any one of the sequences of any one of Tables 2, 3, 6, and 7, and differing in their ability to inhibit the expression of a PNPLA3 gene by not more than about 5, 10, 15, 20, 25, or 30% inhibition from a dsRNA comprising the full sequence, are contemplated to be within the scope of the present invention.

[0170] In addition, the RNAs provided in Tables 2, 3, 6, and 7 identify a site(s) in a PNPLA3 transcript that is susceptible to RISC-mediated cleavage. As such, the present invention further features iRNAs that target within one of these sites. As used herein, an iRNA is said to target within a particular site of an RNA transcript if the iRNA promotes cleavage of the transcript anywhere within that particular site. Such an iRNA will generally include at least about 19 contiguous nucleotides from any one of the sequences provided in any one of Tables 2, 3, 6, and 7 coupled to additional nucleotide sequences taken from the region contiguous to the selected sequence in a PNPLA3 gene.

### III. Modified iRNAs of the Invention

[0171] In certain embodiments, the RNA of the iRNA of the invention e.g., a dsRNA, is un-modified, and does not comprise, e.g., chemical modifications or conjugations known in the art and described herein. In other embodiments, the RNA of an iRNA of the invention, e.g., a dsRNA, is chemically modified to enhance stability or other beneficial characteristics. In certain embodiments of the invention, substantially all of the nucleotides of an iRNA of the invention are modified. In other embodiments of the invention, all of the nucleotides of an iRNA or substantially all of the nucleotides of an iRNA are modified, i.e., not more than 5, 4, 3, 2, or lunmodified nucleotides are present in a strand of the iRNA.

[0172] The nucleic acids featured in the invention can be synthesized or modified by methods well established in the art, such as those described in “Current protocols in nucleic acid chemistry,” Beaucage, S. L. et al. (Edrs.), John Wiley & Sons, Inc., New York, NY, USA, which is hereby incorporated herein by reference. Modifications include, for example, end modifications, e.g., 5′-end modifications (phosphorylation, conjugation, inverted linkages) or 3′-end modifications (conjugation, DNA nucleotides, inverted linkages, etc.); base modifications, e.g., replacement with stabilizing bases, destabilizing bases, or bases that base pair with an expanded repertoire of partners, removal of bases (abasic nucleotides), or conjugated bases; sugar modifications (e.g., at the 2′-position or 4′-position) or replacement of the sugar; or backbone modifications, including modification or replacement of the phosphodiester linkages. Specific examples of iRNA compounds useful in the embodiments described herein include, but are not limited to RNAs containing modified backbones or no natural internucleoside linkages. RNAs having modified backbones include, among others, those that do not have a phosphorus atom in the backbone. For the purposes of this specification, and as sometimes referenced in the art, modified RNAs that do not have a phosphorus atom in their internucleoside backbone can also be considered to be oligonucleosides. In some embodiments, a modified iRNA will have a phosphorus atom in its internucleoside backbone.

[0173] Modified RNA backbones include, for example, phosphorothioates, chiral phosphorothioates, phosphorodithioates, phosphotriesters, aminoalkylphosphotriesters, methyl and other alkyl phosphonates including 3-alkylene phosphonates and chiral phosphonates, phosphinates, phosphoramidates including 3′-amino phosphoramidate and aminoalkylphosphoramidates, thionophosphoramidates, thionoalkylphosphonates, thionoalkylphosphotriesters, and boranophosphates having normal 3′-5′ linkages, 2′-5′-linked analogs of these, and those having inverted polarity wherein the adjacent pairs of nucleoside units are linked 3′-5′ to 5′-3′ or 2′-5′ to 5′-2′. Various salts, mixed salts and free acid forms are also included. In some embodiments of the invention, the dsRNA agents of the invention are in a free acid form. In other embodiments of the invention, the dsRNA agents of the invention are in a salt form. In one embodiment, the dsRNA agents of the invention are in a sodium salt form. In certain embodiments, when the dsRNA agents of the invention are in the sodium salt form, sodium ions are present in the agent as counterions for substantially all of the phosphodiester and/or phosphorothioate groups present in the agent. Agents in which substantially all of the phosphodiester and/or phosphorothioate linkages have a sodium counterion include not more than 5, 4, 3, 2, or 1 phosphodiester and/or phosphorothioate linkages without a sodium counterion. In some embodiments, when the dsRNA agents of the invention are in the sodium salt form, sodium ions are present in the agent as counterions for all of the phosphodiester and/or phosphorothioate groups present in the agent.

[0174] Representative U.S. patents that teach the preparation of the above phosphorus-containing linkages include, but are not limited to, U.S. Pat. Nos. 3,687,808; 4,469,863; 4,476,301; 5,023,243; 5,177,195; 5,188,897; 5,264,423; 5,276,019; 5,278,302; 5,286,717; 5,321,131; 5,399,676; 5,405,939; 5,453,496; 5,455,233; 5,466,677; 5,476,925; 5,519,126; 5,536,821; 5,541,316; 5,550,111; 5,563,253; 5,571,799; 5,587,361; 5,625,050; 6,028,188; 6,124,445; 6,160,109; 6,169,170; 6,172,209; 6,239,265; 6,277,603; 6,326,199; 6,346,614; 6,444,423; 6,531,590; 6,534,639; 6,608,035; 6,683,167; 6,858,715; 6,867,294; 6,878,805; 7,015,315; 7,041,816; 7,273,933; 7,321,029; and U.S. Pat. RE39464, the entire contents of each of which are hereby incorporated herein by reference.

[0175] Modified RNA backbones that do not include a phosphorus atom therein have backbones that are formed by short chain alkyl or cycloalkyl internucleoside linkages, mixed heteroatoms and alkyl or cycloalkyl internucleoside linkages, or one or more short chain heteroatomic or heterocyclic internucleoside linkages. These include those having morpholino linkages (formed in part from the sugar portion of a nucleoside); siloxane backbones; sulfide, sulfoxide and sulfone backbones; formacetyl and thioformacetyl backbones; methylene formacetyl and thioformacetyl backbones; alkene containing backbones; sulfamate backbones; methyleneimino and methylenehydrazino backbones; sulfonate and sulfonamide backbones; amide backbones; and others having mixed N, O, S, and CH₂ component parts.

[0176] Representative U.S. patents that teach the preparation of the above oligonucleosides include, but are not limited to, U.S. Pat. Nos. 5,034,506; 5,166,315; 5,185,444; 5,214,134; 5,216,141; 5,235,033; 5,64,562; 5,264,564; 5,405,938; 5,434,257; 5,466,677; 5,470,967; 5,489,677; 5,541,307; 5,561,225; 5,596,086; 5,602,240; 5,608,046; 5,610,289; 5,618,704; 5,623,070; 5,663,312; 5,633,360; 5,677,437; and 5,677,439, the entire contents of each of which are hereby incorporated herein by reference.

[0177] Suitable RNA mimetics are contemplated for use in iRNAs provided herein, in which both the sugar and the internucleoside linkage, i.e., the backbone, of the nucleotide units are replaced with novel groups. The base units are maintained for hybridization with an appropriate nucleic acid target compound. One such oligomeric compound in which an RNA mimetic that has been shown to have excellent hybridization properties is referred to as a peptide nucleic acid (PNA). In PNA compounds, the sugar backbone of an RNA is replaced with an amide containing backbone, in particular an aminoethylglycine backbone. The nucleobases are retained and are bound directly or indirectly to aza nitrogen atoms of the amide portion of the backbone. Representative US patents that teach the preparation of PNA compounds include, but are not limited to, U.S. Pat. Nos. 5,539,082; 5,714,331; and 5,719,262, the entire contents of each of which are hereby incorporated herein by reference. Additional PNA compounds suitable for use in the iRNAs of the invention are described in, for example, in Nielsen et al., Science, 1991, 254, 1497-1500.

[0178] Some embodiments featured in the invention include RNAs with phosphorothioate backbones and oligonucleosides with heteroatom backbones, and in particular —CH₂—NH—CH₂—, —CH₂—N(CH₃)—O—CH₂— [known as a methylene (methylimino) or MMI backbone], —CH₂—O—N(CH₃)—CH₂—, —CH₂—N(CH₃)—N(CH₃)—CH₂— and —N(CH₃)—CH₂—CH₂—[wherein the native phosphodiester backbone is represented as —O—P—O—CH₂—] of the above-referenced U.S. Pat. No. 5,489,677, and the amide backbones of the above-referenced U.S. Pat. No. 5,602,240. In some embodiments, the RNAs featured herein have morpholino backbone structures of the above-referenced U.S. Pat. No. 5,034,506.

[0179] Modified RNAs can also contain one or more substituted sugar moieties. The iRNAs, e.g., dsRNAs, featured herein can include one of the following at the 2′-position: OH; F; O-, S-, or N-alkyl; O-, S-, or N-alkenyl; O-, S- or N-alkynyl; or O-alkyl-O-alkyl, wherein the alkyl, alkenyl and alkynyl can be substituted or unsubstituted C₁ to C₁₀ alkyl or C₂ to C₁₀ alkenyl and alkynyl. Exemplary suitable modifications include O[(CH₂)ₙO]ₘCH₃, O(CH₂)_{·n}OCH₃, O(CH₂)ₙNH₂, O(CH₂)ₙCH₃, O(CH₂)ₙONH₂, and O(CH₂)ₙON[(CH₂)ₙCH₃)]₂, where n and m are from 1 to about 10. In other embodiments, dsRNAs include one of the following at the 2′ position: C₁ to C₁₀ lower alkyl, substituted lower alkyl, alkaryl, aralkyl, O-alkaryl or O-aralkyl, SH, SCH₃, OCN, Cl, Br, CN, CF₃, OCF₃, SOCH₃, SO₂CH₃, ONO₂, NO₂, N₃, NH₂, heterocycloalkyl, heterocycloalkaryl, aminoalkylamino, polyalkylamino, substituted silyl, an RNA cleaving group, a reporter group, an intercalator, a group for improving the pharmacokinetic properties of an iRNA, or a group for improving the pharmacodynamic properties of an iRNA, and other substituents having similar properties. In some embodiments, the modification includes a 2′-methoxyethoxy (2′-O—CH₂CH₂OCH₃, also known as 2′-O-(2-methoxyethyl) or 2′-MOE) (Martin et al., Helv. Chim. Acta, 1995, 78:486-504) i.e., an alkoxy-alkoxy group. Another exemplary modification is 2′-dimethylaminooxyethoxy, i.e., a O(CH₂)₂ON(CH₃)₂ group, also known as 2′-DMAOE, as described in examples herein below, and 2′-dimethylaminoethoxyethoxy (also known in the art as 2′-O-dimethylaminoethoxyethyl or 2′-DMAEOE), i.e., 2′-O—CH₂—O—CH₂—N(CH₂)₂. Further exemplary modifications include: 5′-Me-2′-F nucleotides, 5′-Me-2′-OMe nucleotides, 5′-Me-2′-deoxynucleotides, (both R and S isomers in these three families); 2′-alkoxyalkyl; and 2′-NMA (N-methylacetamide).

[0180] Other modifications include 2′-methoxy (2′-OCH₃), 2′-aminopropoxy (2′-OCH₂CH₂CH₂NH₂) and 2′-fluoro (2′-F). Similar modifications can also be made at other positions on the RNA of an iRNA, particularly the 3′ position of the sugar on the 3′ terminal nucleotide or in 2′-5′ linked dsRNAs and the 5′ position of 5′ terminal nucleotide. iRNAs can also have sugar mimetics such as cyclobutyl moieties in place of the pentofuranosyl sugar. Representative US patents that teach the preparation of such modified sugar structures include, but are not limited to, U.S. Pat. Nos. 4,981,957; 5,118,800; 5,319,080; 5,359,044; 5,393,878; 5,446,137; 5,466,786; 5,514,785; 5,519,134; 5,567,811; 5,576,427; 5,591,722; 5,597,909; 5,610,300; 5,627,053; 5,639,873; 5,646,265; 5,658,873; 5,670,633; and 5,700,920, certain of which are commonly owned with the instant application. The entire contents of each of the foregoing are hereby incorporated herein by reference.

[0181] An iRNA can also include nucleobase (often referred to in the art simply as “base”) modifications or substitutions. As used herein, “unmodified” or “natural” nucleobases include the purine bases adenine (A) and guanine (G), and the pyrimidine bases thymine (T), cytosine (C), and uracil (U). Modified nucleobases include other synthetic and natural nucleobases such as deoxy-thymine (dT), 5-methylcytosine (5-me-C), 5-hydroxymethyl cytosine, xanthine, hypoxanthine, 2-aminoadenine, 6-methyl and other alkyl derivatives of adenine and guanine, 2-propyl and other alkyl derivatives of adenine and guanine, 2-thiouracil, 2-thiothymine and 2-thiocytosine, 5-halouracil and cytosine, 5-propynyl uracil and cytosine, 6-azo uracil, cytosine and thymine, 5-uracil (pseudouracil), 4-thiouracil, 8-halo, 8-amino, 8-thiol, 8-thioalkyl, 8-hydroxyl anal other 8-substituted adenines and guanines, 5-halo, particularly 5-bromo, 5-trifluoromethyl and other 5-substituted uracils and cytosines, 7-methylguanine and 7-methyladenine, 8-azaguanine and 8-azaadenine, 7-deazaguanine and 7-daazaadenine and 3-deazaguanine and 3-deazaadenine. Further nucleobases include those disclosed in U.S. Pat. No. 3,687,808, those disclosed in Modified Nucleosides in Biochemistry, Biotechnology and Medicine, Herdewijn, P. ed. Wiley-VCH, 2008; those disclosed in The Concise Encyclopedia Of Polymer Science And Engineering, pages 858-859, Kroschwitz, J. L, ed. John Wiley & Sons, 1990, these disclosed by Englisch et al., Angewandte Chemie, International Edition, 1991, 30, 613, and those disclosed by Sanghvi, Y S., Chapter 15, dsRNA Research and Applications, pages 289-302, Crooke, S. T. and Lebleu, B., Ed., CRC Press, 1993. Certain of these nucleobases are particularly useful for increasing the binding affinity of the oligomeric compounds featured in the invention. These include 5-substituted pyrimidines, 6-azapyrimidines and N-2, N-6 and 0-6 substituted purines, including 2-aminopropyladenine, 5-propynyluracil and 5-propynylcytosine. 5-methylcytosine substitutions have been shown to increase nucleic acid duplex stability by 0.6-1.2° C. (Sanghvi, Y. S., Crooke, S. T. and Lebleu, B., Eds., dsRNA Research and Applications, CRC Press, Boca Raton, 1993, pp. 276-278) and are exemplary base substitutions, even more particularly when combined with 2′-O-methoxyethyl sugar modifications.

[0182] Representative U.S. patents that teach the preparation of certain of the above noted modified nucleobases as well as other modified nucleobases include, but are not limited to, the above noted U.S. Pat. Nos. 3,687,808, 4,845,205; 5,130,30; 5,134,066; 5,175,273; 5,367,066; 5,432,272; 5,457,187; 5,459,255; 5,484,908; 5,502,177; 5,525,711; 5,552,540; 5,587,469; 5,594,121, 5,596,091; 5,614,617; 5,681,941; 5,750,692; 6,015,886; 6,147,200; 6,166,197; 6,222,025; 6,235,887; 6,380,368; 6,528,640; 6,639,062; 6,617,438; 7,045,610; 7,427,672; and 7,495,088, the entire contents of each of which are hereby incorporated herein by reference.

[0183] The RNA of an iRNA can also be modified to include one or more locked nucleic acids (LNA). A locked nucleic acid is a nucleotide having a modified ribose moiety in which the ribose moiety comprises an extra bridge connecting the 2′ and 4′ carbons. This structure effectively “locks” the ribose in the 3′-endo structural conformation. The addition of locked nucleic acids to siRNAs has been shown to increase siRNA stability in serum, and to reduce off-target effects (Elmen, J. et al., (2005) Nucleic Acids Research 33(1):439-447; Mook, O R. et al., (2007) Mol Canc Ther 6(3):833-843; Grunweller, A. et al., (2003) Nucleic Acids Research 31(12):3185-3193).

[0184] In some embodiments, the RNA of an iRNA can also be modified to include one or more bicyclic sugar moieties. A “bicyclic sugar” is a furanosyl ring modified by the bridging of two atoms. A “bicyclic nucleoside” (“BNA”) is a nucleoside having a sugar moiety comprising a bridge connecting two carbon atoms of the sugar ring, thereby forming a bicyclic ring system. In certain embodiments, the bridge connects the 4′-carbon and the 2′-carbon of the sugar ring. Thus, in some embodiments an agent of the invention may include one or more locked nucleic acids (LNA). A locked nucleic acid is a nucleotide having a modified ribose moiety in which the ribose moiety comprises an extra bridge connecting the 2′ and 4′ carbons. In other words, an LNA is a nucleotide comprising a bicyclic sugar moiety comprising a 4′-CH₂—O-2′ bridge. This structure effectively “locks” the ribose in the 3′-endo structural conformation. The addition of locked nucleic acids to siRNAs has been shown to increase siRNA stability in serum, and to reduce off-target effects (Elmen, J. et al., (2005) Nucleic Acids Research 33(1):439-447; Mook, O R. et al., (2007) Mol Canc Ther 6(3):833-843; Grunweller, A. et al., (2003) Nucleic Acids Research 31(12):3185-3193). Examples of bicyclic nucleosides for use in the polynucleotides of the invention include without limitation nucleosides comprising a bridge between the 4′ and the 2′ ribosyl ring atoms. In certain embodiments, the antisense polynucleotide agents of the invention include one or more bicyclic nucleosides comprising a 4′ to 2′ bridge. Examples of such 4′ to 2′ bridged bicyclic nucleosides, include but are not limited to 4′-(CH₂)—O-2′ (LNA); 4′-(CH₂)—S-2′; 4′-(CH₂)₂—O-2′ (ENA); 4′-CH(CH₃)—O-2′ (also referred to as “constrained ethyl” or “cEt”) and 4′-CH(CH₂OCH₃)—O-2′ (and analogs thereof; see, e.g., U.S. Pat. No. 7,399,845); 4′-C(CH₃)(CH₃)—O-2′ (and analogs thereof; see e.g., U.S. Pat. No. 8,278,283); 4′-CH₂—N(OCH₃)-2′ (and analogs thereof; see e.g., U.S. Pat. No. 8,278,425); 4′-CH₂—O—N(CH₃)-2′ (see, e.g., U.S. Patent Publication No. 2004/0171570); 4′-CH₂—N(R)—O-2′, wherein R is H, C1-C12 alkyl, or a protecting group (see, e.g., U.S. Pat. No. 7,427,672); 4′-CH₂—C(H)(CH₃)-2′ (see, e.g., Chattopadhyaya et al., J. Org. Chem., 2009, 74, 118-134); and 4′-CH₂—C(═CH₂)-2′ (and analogs thereof; see, e.g., U.S. Pat. No. 8,278,426). The entire contents of each of the foregoing are hereby incorporated herein by reference.

[0185] Additional representative U.S. patents and U.S. patenttent Publications that teach the preparation of locked nucleic acid nucleotides include, but are not limited to, the following: U.S. Pat. Nos. 6,268,490; 6,525,191; 6,670,461; 6,770,748; 6,794,499; 6,998,484; 7,053,207; 7,034,133; 7,084,125; 7,399,845; 7,427,672; 7,569,686; 7,741,457; 8,022,193; 8,030,467; 8,278,425; 8,278,426; 8,278,283; US 2008/0039618; and US 2009/0012281, the entire contents of each of which are hereby incorporated herein by reference.

[0186] Any of the foregoing bicyclic nucleosides can be prepared having one or more stereochemical sugar configurations including for example α-L-ribofuranose and β-D-ribofuranose (see WO 99/14226).

[0187] The RNA of an iRNA can also be modified to include one or more constrained ethyl nucleotides. As used herein, a “constrained ethyl nucleotide” or “cEt” is a locked nucleic acid comprising a bicyclic sugar moiety comprising a 4′-CH(CH₃)—O-2′ bridge. In one embodiment, a constrained ethyl nucleotide is in the S conformation referred to herein as “S-cEt.”

[0188] An iRNA of the invention may also include one or more “conformationally restricted nucleotides” (“CRN”). CRN are nucleotide analogs with a linker connecting the C2′ and C4′ carbons of ribose or the C3 and —C5′ carbons of ribose. CRN lock the ribose ring into a stable conformation and increase the hybridization affinity to mRNA. The linker is of sufficient length to place the oxygen in an optimal position for stability and affinity resulting in less ribose ring puckering.

[0189] Representative publications that teach the preparation of certain of the above noted CRN include, but are not limited to, U.S. Patent Publication No. 2013/0190383; and PCT publication WO 2013/036868, the entire contents of each of which are hereby incorporated herein by reference.

[0190] In some embodiments, an iRNA of the invention comprises one or more monomers that are UNA (unlocked nucleic acid) nucleotides. UNA is unlocked acyclic nucleic acid, wherein any of the bonds of the sugar has been removed, forming an unlocked “sugar” residue. In one example, UNA also encompasses monomer with bonds between C1′-C4′ have been removed (i.e. the covalent carbon-oxygen-carbon bond between the C1′ and C4′ carbons). In another example, the C2′-C3′ bond (i.e. the covalent carbon-carbon bond between the C2′ and C3′ carbons) of the sugar has been removed (see Nuc. Acids Symp. Series, 52, 133-134 (2008) and Fluiter et al., Mol. Biosyst., 2009, 10, 1039 hereby incorporated by reference).

[0191] Representative U.S. publications that teach the preparation of UNA include, but are not limited to, U.S. Pat. No. 8,314,227; and U.S. Patent Publication Nos. 2013/0096289; 2013/0011922; and 2011/0313020, the entire contents of each of which are hereby incorporated herein by reference.

[0192] Potentially stabilizing modifications to the ends of RNA molecules can include N-(acetylaminocaproyl)-4-hydroxyprolinol (Hyp-C6-NHAc), N-(caproyl-4-hydroxyprolinol (Hyp-C6), N-(acetyl-4-hydroxyprolinol (Hyp-NHAc), thymidine-2′-O-deoxythymidine (ether), N-(aminocaproyl)-4-hydroxyprolinol (Hyp-C6-amino), 2-docosanoyl-uridine-3″-phosphate, inverted base dT(idT) and others. Disclosure of this modification can be found in PCT Publication No. WO 2011/005861.

[0193] Other modifications of the nucleotides of an iRNA of the invention include a 5′ phosphate or 5′ phosphate mimic, e.g., a 5′-terminal phosphate or phosphate mimic on the antisense strand of an iRNA. Suitable phosphate mimics are disclosed in, for example U.S. Patent Publication No. 2012/0157511, the entire contents of which are incorporated herein by reference.

A. Modified iRNAs Comprising Motifs of the Invention

[0194] In certain aspects of the invention, the double stranded RNA agents of the invention include agents with chemical modifications as disclosed, for example, in WO2013/075035, the entire contents of each of which are incorporated herein by reference. WO2013/075035 provides motifs of three identical modifications on three consecutive nucleotides into a sense strand or antisense strand of a dsRNAi agent, particularly at or near the cleavage site. In some embodiments, the sense strand and antisense strand of the dsRNAi agent may otherwise be completely modified. The introduction of these motifs interrupts the modification pattern, if present, of the sense or antisense strand. The dsRNAi agent may be optionally conjugated with a GalNAc derivative ligand, for instance on the sense strand.

[0195] More specifically, when the sense strand and antisense strand of the double stranded RNA agent are completely modified to have one or more motifs of three identical modifications on three consecutive nucleotides at or near the cleavage site of at least one strand of a dsRNAi agent, the gene silencing activity of the dsRNAi agent was observed.

[0196] Accordingly, the invention provides double stranded RNA agents capable of inhibiting the expression of a target gene (i.e., PNPLA3 gene) in vivo. The RNAi agent comprises a sense strand and an antisense strand. Each strand of the RNAi agent may be, for example, 17-30 nucleotides in length, 25-30 nucleotides in length, 27-30 nucleotides in length, 19-25 nucleotides in length, 19-23 nucleotides in length, 19-21 nucleotides in length, 21-25 nucleotides in length, or 21-23 nucleotides in length.

[0197] The sense strand and antisense strand typically form a duplex double stranded RNA (“dsRNA”), also referred to herein as “dsRNAi agent.” The duplex region of a dsRNAi agent may be, for example, the duplex region can be 27-30 nucleotide pairs in length, 19-25 nucleotide pairs in length, 19-23 nucleotide pairs in length, 19-21 nucleotide pairs in length, 21-25 nucleotide pairs in length, or 21-23 nucleotide pairs in length. In another example, the duplex region is selected from 19, 20, 21, 22, 23, 24, 25, 26, and 27 nucleotides in length.

[0198] In certain embodiments, the dsRNAi agent may contain one or more overhang regions or capping groups at the 3′-end, 5′-end, or both ends of one or both strands. The overhang can be, independently, 1-6 nucleotides in length, for instance 2-6 nucleotides in length, 1-5 nucleotides in length, 2-5 nucleotides in length, 1-4 nucleotides in length, 2-4 nucleotides in length, 1-3 nucleotides in length, 2-3 nucleotides in length, or 1-2 nucleotides in length. In certain embodiments, the overhang regions can include extended overhang regions as provided above. The overhangs can be the result of one strand being longer than the other, or the result of two strands of the same length being staggered. The overhang can form a mismatch with the target mRNA or it can be complementary to the gene sequences being targeted or can be another sequence. The first and second strands can also be joined, e.g., by additional bases to form a hairpin, or by other non-base linkers.

[0199] In certain embodiments, the nucleotides in the overhang region of the dsRNAi agent can each independently be a modified or unmodified nucleotide including, but no limited to 2′-sugar modified, such as, 2′-F, 2′-O-methyl, thymidine (T), 2′-O-methoxyethyl-5-methyluridine (Teo), 2′-O-methoxyethyladenosine (Aeo), 2′-O-methoxyethyl-5-methylcytidine (m5Ceo), and any combinations thereof.

[0200] For example, TT can be an overhang sequence for either end on either strand. The overhang can form a mismatch with the target mRNA or it can be complementary to the gene sequences being targeted or can be another sequence.

[0201] The 5′- or 3′-overhangs at the sense strand, antisense strand, or both strands of the dsRNAi agent may be phosphorylated. In some embodiments, the overhang region(s) contains two nucleotides having a phosphorothioate between the two nucleotides, where the two nucleotides can be the same or different. In some embodiments, the overhang is present at the 3′-end of the sense strand, antisense strand, or both strands. In some embodiments, this 3′-overhang is present in the antisense strand. In some embodiments, this 3′-overhang is present in the sense strand.

[0202] The dsRNAi agent may contain only a single overhang, which can strengthen the interference activity of the RNAi, without affecting its overall stability. For example, the single-stranded overhang may be located at the 3′-end of the sense strand or, alternatively, at the 3-end of the antisense strand. The RNAi may also have a blunt end, located at the 5′-end of the antisense strand (or the 3′-end of the sense strand) or vice versa. Generally, the antisense strand of the dsRNAi agent has a nucleotide overhang at the 3′-end, and the 5′-end is blunt. While not wishing to be bound by theory, the asymmetric blunt end at the 5′-end of the antisense strand and 3′-end overhang of the antisense strand favor the guide strand loading into RISC process.

[0203] In certain embodiments, the dsRNAi agent is a double ended bluntmer of 19 nucleotides in length, wherein the sense strand contains at least one motif of three 2′-F modifications on three consecutive nucleotides at positions 7, 8, 9 from the 5′end. The antisense strand contains at least one motif of three 2′-O-methyl modifications on three consecutive nucleotides at positions 11, 12, 13 from the 5′end.

[0204] In other embodiments, the dsRNAi agent is a double ended bluntmer of 20 nucleotides in length, wherein the sense strand contains at least one motif of three 2′-F modifications on three consecutive nucleotides at positions 8, 9, 10 from the 5′end. The antisense strand contains at least one motif of three 2′-O-methyl modifications on three consecutive nucleotides at positions 11, 12, 13 from the 5′end.

[0205] In yet other embodiments, the dsRNAi agent is a double ended bluntmer of 21 nucleotides in length, wherein the sense strand contains at least one motif of three 2′-F modifications on three consecutive nucleotides at positions 9, 10, 11 from the 5′end. The antisense strand contains at least one motif of three 2′-O-methyl modifications on three consecutive nucleotides at positions 11, 12, 13 from the 5′end.

[0206] In certain embodiments, the dsRNAi agent comprises a 21 nucleotide sense strand and a 23 nucleotide antisense strand, wherein the sense strand contains at least one motif of three 2′-F modifications on three consecutive nucleotides at positions 9, 10, 11 from the 5′end; the antisense strand contains at least one motif of three 2′-O-methyl modifications on three consecutive nucleotides at positions 11, 12, 13 from the 5′end, wherein one end of the RNAi agent is blunt, while the other end comprises a 2 nucleotide overhang. Preferably, the 2 nucleotide overhang is at the 3′-end of the antisense strand.

[0207] When the 2 nucleotide overhang is at the 3′-end of the antisense strand, there may be two phosphorothioate internucleotide linkages between the terminal three nucleotides, wherein two of the three nucleotides are the overhang nucleotides, and the third nucleotide is a paired nucleotide next to the overhang nucleotide. In one embodiment, the RNAi agent additionally has two phosphorothioate internucleotide linkages between the terminal three nucleotides at both the 5′-end of the sense strand and at the 5′-end of the antisense strand. In certain embodiments, every nucleotide in the sense strand and the antisense strand of the dsRNAi agent, including the nucleotides that are part of the motifs are modified nucleotides. In certain embodiments each residue is independently modified with a 2′-O-methyl or 3′-fluoro, e.g., in an alternating motif. Optionally, the dsRNAi agent further comprises a ligand (preferably GalNAc₃).

[0208] In certain embodiments, the dsRNAi agent comprises a sense and an antisense strand, wherein the sense strand is 25-30 nucleotide residues in length, wherein starting from the 5′ terminal nucleotide (position 1) positions 1 to 23 of the first strand comprise at least 8 ribonucleotides; the antisense strand is 36-66 nucleotide residues in length and, starting from the 3′ terminal nucleotide, comprises at least 8 ribonucleotides in the positions paired with positions 1-23 of sense strand to form a duplex; wherein at least the 3′ terminal nucleotide of antisense strand is unpaired with sense strand, and up to 6 consecutive 3′ terminal nucleotides are unpaired with sense strand, thereby forming a 3′ single stranded overhang of 1-6 nucleotides; wherein the 5′ terminus of antisense strand comprises from 10-30 consecutive nucleotides which are unpaired with sense strand, thereby forming a 10-30 nucleotide single stranded 5′ overhang; wherein at least the sense strand 5′ terminal and 3′ terminal nucleotides are base paired with nucleotides of antisense strand when sense and antisense strands are aligned for maximum complementarity, thereby forming a substantially duplexed region between sense and antisense strands; and antisense strand is sufficiently complementary to a target RNA along at least 19 ribonucleotides of antisense strand length to reduce target gene expression when the double stranded nucleic acid is introduced into a mammalian cell; and wherein the sense strand contains at least one motif of three 2′-F modifications on three consecutive nucleotides, where at least one of the motifs occurs at or near the cleavage site. The antisense strand contains at least one motif of three 2′-O-methyl modifications on three consecutive nucleotides at or near the cleavage site.

[0209] In certain embodiments, the dsRNAi agent comprises sense and antisense strands, wherein the dsRNAi agent comprises a first strand having a length which is at least 25 and at most 29 nucleotides and a second strand having a length which is at most 30 nucleotides with at least one motif of three 2′-O-methyl modifications on three consecutive nucleotides at position 11, 12, 13 from the 5′ end; wherein the 3′ end of the first strand and the 5′ end of the second strand form a blunt end and the second strand is 1-4 nucleotides longer at its 3′ end than the first strand, wherein the duplex region which is at least 25 nucleotides in length, and the second strand is sufficiently complementary to a target mRNA along at least 19 nucleotide of the second strand length to reduce target gene expression when the RNAi agent is introduced into a mammalian cell, and wherein Dicer cleavage of the dsRNAi agent preferentially results in an siRNA comprising the 3′-end of the second strand, thereby reducing expression of the target gene in the mammal. Optionally, the dsRNAi agent further comprises a ligand.

[0210] In certain embodiments, the sense strand of the dsRNAi agent contains at least one motif of three identical modifications on three consecutive nucleotides, where one of the motifs occurs at the cleavage site in the sense strand.

[0211] In certain embodiments, the antisense strand of the dsRNAi agent can also contain at least one motif of three identical modifications on three consecutive nucleotides, where one of the motifs occurs at or near the cleavage site in the antisense strand.

[0212] For a dsRNAi agent having a duplex region of 19-23 nucleotides in length, the cleavage site of the antisense strand is typically around the 10, 11, and 12 positions from the 5′-end. Thus the motifs of three identical modifications may occur at the 9, 10, 11 positions; the 10, 11, 12 positions; the 11, 12, 13 positions; the 12, 13, 14 positions; or the 13, 14, 15 positions of the antisense strand, the count starting from the first nucleotide from the 5′-end of the antisense strand, or, the count starting from the first paired nucleotide within the duplex region from the 5′-end of the antisense strand. The cleavage site in the antisense strand may also change according to the length of the duplex region of the dsRNAi agent from the 5′-end.

[0213] The sense strand of the dsRNAi agent may contain at least one motif of three identical modifications on three consecutive nucleotides at the cleavage site of the strand; and the antisense strand may have at least one motif of three identical modifications on three consecutive nucleotides at or near the cleavage site of the strand. When the sense strand and the antisense strand form a dsRNA duplex, the sense strand and the antisense strand can be so aligned that one motif of the three nucleotides on the sense strand and one motif of the three nucleotides on the antisense strand have at least one nucleotide overlap, i.e., at least one of the three nucleotides of the motif in the sense strand forms a base pair with at least one of the three nucleotides of the motif in the antisense strand. Alternatively, at least two nucleotides may overlap, or all three nucleotides may overlap.

[0214] In some embodiments, the sense strand of the dsRNAi agent may contain more than one motif of three identical modifications on three consecutive nucleotides. The first motif may occur at or near the cleavage site of the strand and the other motifs may be a wing modification. The term “wing modification” herein refers to a motif occurring at another portion of the strand that is separated from the motif at or near the cleavage site of the same strand. The wing modification is either adjacent to the first motif or is separated by at least one or more nucleotides. When the motifs are immediately adjacent to each other then the chemistries of the motifs are distinct from each other, and when the motifs are separated by one or more nucleotide than the chemistries can be the same or different. Two or more wing modifications may be present. For instance, when two wing modifications are present, each wing modification may occur at one end relative to the first motif which is at or near cleavage site or on either side of the lead motif.

[0215] Like the sense strand, the antisense strand of the dsRNAi agent may contain more than one motif of three identical modifications on three consecutive nucleotides, with at least one of the motifs occurring at or near the cleavage site of the strand. This antisense strand may also contain one or more wing modifications in an alignment similar to the wing modifications that may be present on the sense strand.

[0216] In some embodiments, the wing modification on the sense strand or antisense strand of the dsRNAi agent typically does not include the first one or two terminal nucleotides at the 3′-end, 5′-end, or both ends of the strand.

[0217] In other embodiments, the wing modification on the sense strand or antisense strand of the dsRNAi agent typically does not include the first one or two paired nucleotides within the duplex region at the 3′-end, 5′-end, or both ends of the strand.

[0218] When the sense strand and the antisense strand of the dsRNAi agent each contain at least one wing modification, the wing modifications may fall on the same end of the duplex region, and have an overlap of one, two, or three nucleotides.

[0219] When the sense strand and the antisense strand of the dsRNAi agent each contain at least two wing modifications, the sense strand and the antisense strand can be so aligned that two modifications each from one strand fall on one end of the duplex region, having an overlap of one, two, or three nucleotides; two modifications each from one strand fall on the other end of the duplex region, having an overlap of one, two or three nucleotides; two modifications one strand fall on each side of the lead motif, having an overlap of one, two or three nucleotides in the duplex region.

[0220] In some embodiments, every nucleotide in the sense strand and antisense strand of the dsRNAi agent, including the nucleotides that are part of the motifs, may be modified. Each nucleotide may be modified with the same or different modification which can include one or more alteration of one or both of the non-linking phosphate oxygens or of one or more of the linking phosphate oxygens; alteration of a constituent of the ribose sugar, e.g., of the 2′-hydroxyl on the ribose sugar; wholesale replacement of the phosphate moiety with “dephospho” linkers; modification or replacement of a naturally occurring base; and replacement or modification of the ribose-phosphate backbone.

[0221] As nucleic acids are polymers of subunits, many of the modifications occur at a position which is repeated within a nucleic acid, e.g., a modification of a base, or a phosphate moiety, or a non-linking O of a phosphate moiety. In some cases the modification will occur at all of the subject positions in the nucleic acid but in many cases it will not. By way of example, a modification may only occur at a 3′- or 5′ terminal position, may only occur in a terminal region, e.g., at a position on a terminal nucleotide or in the last 2, 3, 4, 5, or 10 nucleotides of a strand. A modification may occur in a double strand region, a single strand region, or in both. A modification may occur only in the double strand region of an RNA or may only occur in a single strand region of a RNA. For example, a phosphorothioate modification at a non-linking O position may only occur at one or both termini, may only occur in a terminal region, e.g., at a position on a terminal nucleotide or in the last 2, 3, 4, 5, or 10 nucleotides of a strand, or may occur in double strand and single strand regions, particularly at termini. The 5′-end or ends can be phosphorylated.

[0222] It may be possible, e.g., to enhance stability, to include particular bases in overhangs, or to include modified nucleotides or nucleotide surrogates, in single strand overhangs, e.g., in a 5′- or 3′-overhang, or in both. For example, it can be desirable to include purine nucleotides in overhangs. In some embodiments all or some of the bases in a 3′- or 5′-overhang may be modified, e.g., with a modification described herein. Modifications can include, e.g., the use of modifications at the 2′ position of the ribose sugar with modifications that are known in the art, e.g., the use of deoxyribonucleotides, 2′-deoxy-2′-fluoro (2′-F) or 2′-O-methyl modified instead of the ribosugar of the nucleobase, and modifications in the phosphate group, e.g., phosphorothioate modifications. Overhangs need not be homologous with the target sequence.

[0223] In some embodiments, each residue of the sense strand and antisense strand is independently modified with LNA, CRN, cET, UNA, HNA, CeNA, 2′-methoxyethyl, 2′-O-methyl, 2′-O-allyl, 2′-C-allyl, 2′-deoxy, 2′-hydroxyl, or 2′-fluoro. The strands can contain more than one modification. In one embodiment, each residue of the sense strand and antisense strand is independently modified with 2′-O-methyl or 2′-fluoro.

[0224] At least two different modifications are typically present on the sense strand and antisense strand. Those two modifications may be the 2′-O-methyl or 2′-fluoro modifications, or others.

[0225] In certain embodiments, the Nₐ or N_{b} comprise modifications of an alternating pattern. The term “alternating motif” as used herein refers to a motif having one or more modifications, each modification occurring on alternating nucleotides of one strand. The alternating nucleotide may refer to one per every other nucleotide or one per every three nucleotides, or a similar pattern. For example, if A, B and C each represent one type of modification to the nucleotide, the alternating motif can be “ABABABABABAB . . . ,” “AABBAABBAABB . . . ,” “AABAABAABAAB . . . ,” “AAABAAABAAAB . . . ,” “AAABBBAAABBB . . . ,” or “ABCABCABCABC . . . ,” etc.

[0226] The type of modifications contained in the alternating motif may be the same or different. For example, if A, B, C, D each represent one type of modification on the nucleotide, the alternating pattern, i.e., modifications on every other nucleotide, may be the same, but each of the sense strand or antisense strand can be selected from several possibilities of modifications within the alternating motif such as “ABABAB . . . ”, “ACACAC . . . ” “BDBDBD . . . ” or “CDCDCD . . . ,” etc.

[0227] In some embodiments, the dsRNAi agent of the invention comprises the modification pattern for the alternating motif on the sense strand relative to the modification pattern for the alternating motif on the antisense strand is shifted. The shift may be such that the modified group of nucleotides of the sense strand corresponds to a differently modified group of nucleotides of the antisense strand and vice versa. For example, the sense strand when paired with the antisense strand in the dsRNA duplex, the alternating motif in the sense strand may start with “ABABAB” from 5′ to 3′ of the strand and the alternating motif in the antisense strand may start with “BABABA” from 5′ to 3′ of the strand within the duplex region. As another example, the alternating motif in the sense strand may start with “AABBAABB” from 5′ to 3′ of the strand and the alternating motif in the antisense strand may start with “BBAABBAA” from 5′ to 3′ of the strand within the duplex region, so that there is a complete or partial shift of the modification patterns between the sense strand and the antisense strand.

[0228] In some embodiments, the dsRNAi agent comprises the pattern of the alternating motif of 2′-O-methyl modification and 2′-F modification on the sense strand initially has a shift relative to the pattern of the alternating motif of 2′-O-methyl modification and 2′-F modification on the antisense strand initially, i.e., the 2′-O-methyl modified nucleotide on the sense strand base pairs with a 2′-F modified nucleotide on the antisense strand and vice versa. The 1 position of the sense strand may start with the 2′-F modification, and the 1 position of the antisense strand may start with the 2′-O-methyl modification.

[0229] The introduction of one or more motifs of three identical modifications on three consecutive nucleotides to the sense strand or antisense strand interrupts the initial modification pattern present in the sense strand or antisense strand. This interruption of the modification pattern of the sense or antisense strand by introducing one or more motifs of three identical modifications on three consecutive nucleotides to the sense or antisense strand may enhance the gene silencing activity against the target gene.

[0230] In some embodiments, when the motif of three identical modifications on three consecutive nucleotides is introduced to any of the strands, the modification of the nucleotide next to the motif is a different modification than the modification of the motif. For example, the portion of the sequence containing the motif is “ . . . NₐYYYN_{b} . . . ,” where “Y” represents the modification of the motif of three identical modifications on three consecutive nucleotide, and “Nₐ” and “N_{b}” represent a modification to the nucleotide next to the motif “YYY” that is different than the modification of Y, and where Nₐ and N_{b} can be the same or different modifications. Alternatively, Nₐ or N_{b} may be present or absent when there is a wing modification present.

[0231] The iRNA may further comprise at least one phosphorothioate or methylphosphonate internucleotide linkage. The phosphorothioate or methylphosphonate internucleotide linkage modification may occur on any nucleotide of the sense strand, antisense strand, or both strands in any position of the strand. For instance, the internucleotide linkage modification may occur on every nucleotide on the sense strand or antisense strand; each internucleotide linkage modification may occur in an alternating pattern on the sense strand or antisense strand; or the sense strand or antisense strand may contain both internucleotide linkage modifications in an alternating pattern. The alternating pattern of the internucleotide linkage modification on the sense strand may be the same or different from the antisense strand, and the alternating pattern of the internucleotide linkage modification on the sense strand may have a shift relative to the alternating pattern of the internucleotide linkage modification on the antisense strand. In one embodiment, a double-stranded RNAi agent comprises 6-8 phosphorothioate internucleotide linkages. In some embodiments, the antisense strand comprises two phosphorothioate internucleotide linkages at the 5′-end and two phosphorothioate internucleotide linkages at the 3′-end, and the sense strand comprises at least two phosphorothioate internucleotide linkages at either the 5′-end or the 3′-end.

[0232] In some embodiments, the dsRNAi agent comprises a phosphorothioate or methylphosphonate internucleotide linkage modification in the overhang region. For example, the overhang region may contain two nucleotides having a phosphorothioate or methylphosphonate internucleotide linkage between the two nucleotides. Internucleotide linkage modifications also may be made to link the overhang nucleotides with the terminal paired nucleotides within the duplex region. For example, at least 2, 3, 4, or all the overhang nucleotides may be linked through phosphorothioate or methylphosphonate internucleotide linkage, and optionally, there may be additional phosphorothioate or methylphosphonate internucleotide linkages linking the overhang nucleotide with a paired nucleotide that is next to the overhang nucleotide. For instance, there may be at least two phosphorothioate internucleotide linkages between the terminal three nucleotides, in which two of the three nucleotides are overhang nucleotides, and the third is a paired nucleotide next to the overhang nucleotide. These terminal three nucleotides may be at the 3′-end of the antisense strand, the 3′-end of the sense strand, the 5′-end of the antisense strand, or the 5′end of the antisense strand.

[0233] In some embodiments, the 2-nucleotide overhang is at the 3′-end of the antisense strand, and there are two phosphorothioate internucleotide linkages between the terminal three nucleotides, wherein two of the three nucleotides are the overhang nucleotides, and the third nucleotide is a paired nucleotide next to the overhang nucleotide. Optionally, the dsRNAi agent may additionally have two phosphorothioate internucleotide linkages between the terminal three nucleotides at both the 5′-end of the sense strand and at the 5′-end of the antisense strand.

[0234] In one embodiment, the dsRNAi agent comprises mismatch(es) with the target, within the duplex, or combinations thereof. The mismatch may occur in the overhang region or the duplex region. The base pair may be ranked on the basis of their propensity to promote dissociation or melting (e.g., on the free energy of association or dissociation of a particular pairing, the simplest approach is to examine the pairs on an individual pair basis, though next neighbor or similar analysis can also be used). In terms of promoting dissociation: A:U is preferred over G:C; G:U is preferred over G:C; and I:C is preferred over G:C (I=inosine). Mismatches, e.g., non-canonical or other than canonical pairings (as described elsewhere herein) are preferred over canonical (A:T, A:U, G:C) pairings; and pairings which include a universal base are preferred over canonical pairings.

[0235] In certain embodiments, the dsRNAi agent comprises at least one of the first 1, 2, 3, 4, or 5 base pairs within the duplex regions from the 5′-end of the antisense strand independently selected from the group of: A:U, G:U, I:C, and mismatched pairs, e.g., non-canonical or other than canonical pairings or pairings which include a universal base, to promote the dissociation of the antisense strand at the 5′-end of the duplex.

[0236] In certain embodiments, the nucleotide at the 1 position within the duplex region from the 5′-end in the antisense strand is selected from A, dA, dU, U, and dT. Alternatively, at least one of the first 1, 2, or 3 base pair within the duplex region from the 5′-end of the antisense strand is an AU base pair. For example, the first base pair within the duplex region from the 5′-end of the antisense strand is an AU base pair.

[0237] In other embodiments, the nucleotide at the 3′-end of the sense strand is deoxy-thymine (dT) or the nucleotide at the 3′-end of the antisense strand is deoxy-thymine (dT). For example, there is a short sequence of deoxy-thymine nucleotides, for example, two dT nucleotides on the 3′-end of the sense, antisense strand, or both strands.

[0238] In certain embodiments, the sense strand sequence may be represented by formula (I):

5′nₚ-Nₐ-(XXX)ᵢ-N_{b}-YYY-N_{b}-(ZZZ)ⱼ-Nₐ-n_{q}3′ (I)

[0239] wherein:
[0240] i and j are each independently 0 or 1;
[0241] p and q are each independently 0-6;
[0242] each Nₐ independently represents an oligonucleotide sequence comprising 0-25 modified nucleotides, each sequence comprising at least two differently modified nucleotides;
[0243] each N_{b} independently represents an oligonucleotide sequence comprising 0-10 modified nucleotides;
[0244] each nₚ and n_{q} independently represent an overhang nucleotide;
[0245] wherein Nb and Y do not have the same modification; and
[0246] XXX, YYY, and ZZZ each independently represent one motif of three identical modifications on three consecutive nucleotides. Preferably YYY is all 2′-F modified nucleotides.

[0247] In some embodiments, the Nₐ or N_{b} comprises modifications of alternating pattern.

[0248] In some embodiments, the YYY motif occurs at or near the cleavage site of the sense strand. For example, when the dsRNAi agent has a duplex region of 17-23 nucleotides in length, the YYY motif can occur at or the vicinity of the cleavage site (e.g.: can occur at positions 6, 7, 8; 7, 8, 9; 8, 9, 10; 9, 10, 11; 10, 11, 12; or 11, 12, 13) of the sense strand, the count starting from the first nucleotide, from the 5′-end; or optionally, the count starting at the first paired nucleotide within the duplex region, from the 5′-end.

[0249] In one embodiment, i is 1 and j is 0, or i is 0 and j is 1, or both i and j are 1. The sense strand can therefore be represented by the following formulas:

5′nₚ-Nₐ-YYY-N_{b}-ZZZ-Nₐ-n_{q}3′ (Ib);

5′nₚ-Nₐ-XXX-N_{b}-YYY-Nₐ-n_{q}3′ (Ic); or

5′nₚ-Nₐ-XXX-N_{b}-YYY-N_{b}-ZZZ-Nₐ-n_{q}3′ (Id).

[0250] When the sense strand is represented by formula (Ib), N_{b} represents an oligonucleotide sequence comprising 0-10, 0-7, 0-5, 0-4, 0-2, or 0 modified nucleotides. Each Nₐ independently can represent an oligonucleotide sequence comprising 2-20, 2-15, or 2-10 modified nucleotides.

[0251] When the sense strand is represented as formula (Ic), N_{b} represents an oligonucleotide sequence comprising 0-10, 0-7, 0-10, 0-7, 0-5, 0-4, 0-2, or 0 modified nucleotides. Each Nₐ can independently represent an oligonucleotide sequence comprising 2-20, 2-15, or 2-10 modified nucleotides.

[0252] When the sense strand is represented as formula (Id), each N_{b} independently represents an oligonucleotide sequence comprising 0-10, 0-7, 0-5, 0-4, 0-2, or 0 modified nucleotides. Preferably, N_{b} is 0, 1, 2, 3, 4, 5, or 6 Each Nₐ can independently represent an oligonucleotide sequence comprising 2-20, 2-15, or 2-10 modified nucleotides.

[0253] Each of X, Y and Z may be the same or different from each other.

[0254] In other embodiments, i is 0 and j is 0, and the sense strand may be represented by the formula:

5′nₚ-Nₐ-YYY-Nₐ-n_{q}3′ (Ia).

[0255] When the sense strand is represented by formula (Ia), each Nₐ independently can represent an oligonucleotide sequence comprising 2-20, 2-15, or 2-10 modified nucleotides.

[0256] In one embodiment, the antisense strand sequence of the RNAi may be represented by formula (II):

5′n_{q}′-Nₐ′-(Z′Z′Z′)ₖ-N_{b}′-Y′Y′Y′-N_{b}′-(X′X′X′)ₗ-N′ₐ-nₚ′3′ (II)

wherein:
[0257] k and l are each independently 0 or 1;
[0258] p′ and q′ are each independently 0-6;
[0259] each Nₐ′independently represents an oligonucleotide sequence comprising 0-25 modified nucleotides, each sequence comprising at least two differently modified nucleotides;
[0260] each N_{b}′independently represents an oligonucleotide sequence comprising 0-10 modified nucleotides;
[0261] each nₚ′ and n_{q}′independently represent an overhang nucleotide;
[0262] wherein N_{b}′ and Y′ do not have the same modification; and
[0263] X′X′X′, Y′Y′Y′, and Z′Z′Z′ each independently represent one motif of three identical modifications on three consecutive nucleotides.

[0264] In some embodiments, the Nₐ′ or N_{b}′comprises modifications of alternating pattern.

[0265] The Y′Y′Y′ motif occurs at or near the cleavage site of the antisense strand. For example, when the dsRNAi agent has a duplex region of 17-23 nucleotides in length, the Y′Y′Y′ motif can occur at positions 9, 10, 11; 10, 11, 12; 11, 12, 13; 12, 13, 14; or 13, 14, 15 of the antisense strand, with the count starting from the first nucleotide, from the 5′-end; or optionally, the count starting at the first paired nucleotide within the duplex region, from the 5′-end. Preferably, the Y′Y′Y′ motif occurs at positions 11, 12, 13.

[0266] In certain embodiments, Y′Y′Y′ motif is all 2′-OMe modified nucleotides.

[0267] In certain embodiments, k is 1 and l is 0, or k is 0 and l is 1, or both k and l are 1.

[0268] The antisense strand can therefore be represented by the following formulas:

5′n_{q}′-Nₐ′-Z′Z′Z′-N_{b}′-Y′Y′Y′-Nₐ′-n_{p′}3′ (IIb);

5′n_{q}′-Nₐ′-Y′Y′Y′-N_{b}′-X′X′X′-n_{p′}3′ (IIc); or

5′n_{q}′-Nₐ′-Z′Z′Z′-N_{b}′-Y′Y′Y′-N_{b}′-X′X′X′-Nₐ′-n_{p′}3′ (IId).

[0269] When the antisense strand is represented by formula (IIb), N_{b}′represents an oligonucleotide sequence comprising 0-10, 0-7, 0-10, 0-7, 0-5, 0-4, 0-2, or 0 modified nucleotides. Each Nₐ′independently represents an oligonucleotide sequence comprising 2-20, 2-15, or 2-10 modified nucleotides.

[0270] When the antisense strand is represented as formula (IIc), N_{b}′represents an oligonucleotide sequence comprising 0-10, 0-7, 0-10, 0-7, 0-5, 0-4, 0-2, or 0 modified nucleotides. Each Nₐ′independently represents an oligonucleotide sequence comprising 2-20, 2-15, or 2-10 modified nucleotides.

[0271] When the antisense strand is represented as formula (IId), each N_{b}′independently represents an oligonucleotide sequence comprising 0-10, 0-7, 0-10, 0-7, 0-5, 0-4, 0-2, or 0 modified nucleotides. Each Nₐ′independently represents an oligonucleotide sequence comprising 2-20, 2-15, or 2-10 modified nucleotides. Preferably, N_{b} is 0, 1, 2, 3, 4, 5, or 6.

[0272] In other embodiments, k is 0 and l is 0 and the antisense strand may be represented by the formula:

5′nₚ-Nₐ-Y′Y′Y′-Nₐ′-n_{q}′3′ (Ia).

[0273] When the antisense strand is represented as formula (IIa), each Nₐ′independently represents an oligonucleotide sequence comprising 2-20, 2-15, or 2-10 modified nucleotides. Each of X′, Y′ and Z′ may be the same or different from each other.

[0274] Each nucleotide of the sense strand and antisense strand may be independently modified with LNA, CRN, UNA, cEt, HNA, CeNA, 2′-methoxyethyl, 2′-O-methyl, 2′-O-allyl, 2′-C-allyl, 2′-hydroxyl, or 2′-fluoro. For example, each nucleotide of the sense strand and antisense strand is independently modified with 2′-O-methyl or 2′-fluoro. Each X, Y, Z, X′, Y′, and Z′, in particular, may represent a 2′-O-methyl modification or a 2′-fluoro modification.

[0275] In some embodiments, the sense strand of the dsRNAi agent may contain YYY motif occurring at 9, 10, and 11 positions of the strand when the duplex region is 21 nt, the count starting from the first nucleotide from the 5′-end, or optionally, the count starting at the first paired nucleotide within the duplex region, from the 5′-end; and Y represents 2′-F modification. The sense strand may additionally contain XXX motif or ZZZ motifs as wing modifications at the opposite end of the duplex region; and XXX and ZZZ each independently represents a 2′-OMe modification or 2′-F modification.

[0276] In some embodiments the antisense strand may contain Y′Y′Y′ motif occurring at positions 11, 12, 13 of the strand, the count starting from the first nucleotide from the 5′-end, or optionally, the count starting at the first paired nucleotide within the duplex region, from the 5′-end; and Y′ represents 2′-O-methyl modification. The antisense strand may additionally contain X′X′X′ motif or Z′Z′Z′ motifs as wing modifications at the opposite end of the duplex region; and X′X′X′ and Z′Z′Z′ each independently represents a 2′-OMe modification or 2′-F modification.

[0277] The sense strand represented by any one of the above formulas (Ia), (Ib), (Ic), and (Id) forms a duplex with an antisense strand being represented by any one of formulas (IIa), (IIb), (IIc), and (IId), respectively.

[0278] Accordingly, the dsRNAi agents for use in the methods of the invention may comprise a sense strand and an antisense strand, each strand having 14 to 30 nucleotides, the iRNA duplex represented by formula (III):

(III)
sense:
5′ nₚ-Na-(X X X)ᵢ-Nb-Y Y Y-N_{b}-(ZZZ)ⱼ-Nₐ-n_{q} 3′
antisense:
3′ np′-Na′-(X′X′X′)ₖ-N_{b}′-Y′Y′Y′-N_{b}′-(Z′Z′Z′)ₗ-Nₐ′-
n_{q}′ 5′

[0279] wherein:
[0280] i, j, k, and 1 are each independently 0 or 1;
[0281] p, p′, q, and q′ are each independently 0-6;
[0282] each Nₐ and Nₐ′ independently represents an oligonucleotide sequence comprising 0-25 modified nucleotides, each sequence comprising at least two differently modified nucleotides;
[0283] each N_{b} and N_{b}′ independently represents an oligonucleotide sequence comprising 0-10 modified nucleotides;
[0284] wherein each nₚ′, nₚ, n_{q}′, and n_{q}, each of which may or may not be present, independently represents an overhang nucleotide; and
[0285] XXX, YYY, ZZZ, X′X′X′, Y′Y′Y′, and Z′Z′Z′ each independently represent one motif of three identical modifications on three consecutive nucleotides.

[0286] In one embodiment, i is 0 and j is 0; or i is 1 and j is 0; or i is 0 and j is 1; or both i and j are 0; or both i and j are 1. In another embodiment, k is 0 and l is 0; or k is 1 and l is 0; k is 0 and l is 1; or both k and l are 0; or both k and l are 1.

[0287] Exemplary combinations of the sense strand and antisense strand forming an iRNA duplex include the formulas below:

5′nₚ-Nₐ-YYY-Nₐ-n_{q}3′

3′nₚ′-Nₐ′-Y′Y′Y′-Nₐ′n_{q}′5′ (IIIa)

5′nₚ-Nₐ-YYY-N_{b}-ZZZ-Nₐ-n_{q}3′

3′nₚ′-Nₐ′-Y′Y′Y′-N_{b}′-Z′Z′Z′-Nₐ′n_{q}′5′ (IIIb)

5′nₚ-Nₐ-XXX-N_{b}-YYY-Nₐ-n_{q}3′

3′nₚ′-Nₐ′-X′X′X′-N_{b}′-Y′Y′Y′-Nₐ′-n_{q}′5′ (IIIc)

5′nₚ-Nₐ-XXX-N_{b}-YYY-N_{b}-ZZZ-Nₐ-n_{q}3′

3′nₚ′-Nₐ′-X′X′X′-N_{b}′-Y′Y′Y′-N_{b}′-Z′Z′Z′-Nₐ-n_{q}′5′ (IIId)

[0288] When the dsRNAi agent is represented by formula (IIIa), each Nₐ independently represents an oligonucleotide sequence comprising 2-20, 2-15, or 2-10 modified nucleotides.

[0289] When the dsRNAi agent is represented by formula (IIIb), each N_{b} independently represents an oligonucleotide sequence comprising 1-10, 1-7, 1-5, or 1-4 modified nucleotides. Each Nₐ independently represents an oligonucleotide sequence comprising 2-20, 2-15, or 2-10 modified nucleotides.

[0290] When the dsRNAi agent is represented as formula (IIIc), each N_{b}, N_{b}′ independently represents an oligonucleotide sequence comprising 0-10, 0-7, 0-10, 0-7, 0-5, 0-4, 0-2, or 0 modified nucleotides. Each Nₐ independently represents an oligonucleotide sequence comprising 2-20, 2-15, or 2-10 modified nucleotides.

[0291] When the dsRNAi agent is represented as formula (IIId), each N_{b}, N_{b}′ independently represents an oligonucleotide sequence comprising 0-10, 0-7, 0-10, 0-7, 0-5, 0-4, 0-2, or 0 modified nucleotides. Each Nₐ, Nₐ′ independently represents an oligonucleotide sequence comprising 2-20, 2-15, or 2-10 modified nucleotides. Each of Nₐ, Nₐ′, N_{b}, and N_{b}′ independently comprises modifications of alternating pattern.

[0292] Each of X, Y, and Z in formulas (III), (IIIa), (IIIb), (IIIc), and (IIId) may be the same or different from each other.

[0293] When the dsRNAi agent is represented by formula (III), (IIIa), (IIIb), (IIIc), and (IIId), at least one of the Y nucleotides may form a base pair with one of the Y′ nucleotides. Alternatively, at least two of the Y nucleotides form base pairs with the corresponding Y′ nucleotides; or all three of the Y nucleotides all form base pairs with the corresponding Y′ nucleotides.

[0294] When the dsRNAi agent is represented by formula (IIIb) or (IIId), at least one of the Z nucleotides may form a base pair with one of the Z′ nucleotides. Alternatively, at least two of the Z nucleotides form base pairs with the corresponding Z′ nucleotides; or all three of the Z nucleotides all form base pairs with the corresponding Z′ nucleotides.

[0295] When the dsRNAi agent is represented as formula (IIIc) or (IIId), at least one of the X nucleotides may form a base pair with one of the X′ nucleotides. Alternatively, at least two of the X nucleotides form base pairs with the corresponding X′ nucleotides; or all three of the X nucleotides all form base pairs with the corresponding X′ nucleotides.

[0296] In certain embodiments, the modification on the Y nucleotide is different than the modification on the Y′ nucleotide, the modification on the Z nucleotide is different than the modification on the Z′ nucleotide, or the modification on the X nucleotide is different than the modification on the X′ nucleotide.

[0297] In certain embodiments, when the dsRNAi agent is represented by formula (IIId), the Nₐ modifications are 2′-O-methyl or 2′-fluoro modifications. In other embodiments, when the RNAi agent is represented by formula (IIId), the Nₐ modifications are 2′-O-methyl or 2′-fluoro modifications and nₚ′>0 and at least one nₚ′ is linked to a neighboring nucleotide a via phosphorothioate linkage. In yet other embodiments, when the RNAi agent is represented by formula (IIId), the Nₐ modifications are 2′-O-methyl or 2′-fluoro modifications, nₚ′>0 and at least one nₚ′ is linked to a neighboring nucleotide via phosphorothioate linkage, and the sense strand is conjugated to one or more GalNAc derivatives attached through a bivalent or trivalent branched linker (described below). In other embodiments, when the RNAi agent is represented by formula (IIId), the Nₐ modifications are 2′-O-methyl or 2′-fluoro modifications, nₚ′>0 and at least one nₚ′ is linked to a neighboring nucleotide via phosphorothioate linkage, the sense strand comprises at least one phosphorothioate linkage, and the sense strand is conjugated to one or more GalNAc derivatives attached through a bivalent or trivalent branched linker.

[0298] In some embodiments, when the dsRNAi agent is represented by formula (IIIa), the Nₐ modifications are 2′-O-methyl or 2′-fluoro modifications, nₚ′>0 and at least one nₚ′ is linked to a neighboring nucleotide via phosphorothioate linkage, the sense strand comprises at least one phosphorothioate linkage, and the sense strand is conjugated to one or more GalNAc derivatives attached through a bivalent or trivalent branched linker.

[0299] In some embodiments, the dsRNAi agent is a multimer containing at least two duplexes represented by formula (III), (IIIa), (IIIb), (IIIc), and (IIId), wherein the duplexes are connected by a linker. The linker can be cleavable or non-cleavable. Optionally, the multimer further comprises a ligand. Each of the duplexes can target the same gene or two different genes; or each of the duplexes can target same gene at two different target sites.

[0300] In some embodiments, the dsRNAi agent is a multimer containing three, four, five, six, or more duplexes represented by formula (III), (IIIa), (IIIb), (IIIc), and (IIId), wherein the duplexes are connected by a linker. The linker can be cleavable or non-cleavable. Optionally, the multimer further comprises a ligand. Each of the duplexes can target the same gene or two different genes; or each of the duplexes can target same gene at two different target sites.

[0301] In one embodiment, two dsRNAi agents represented by at least one of formulas (III), (IIIa), (IIIb), (IIIc), and (IIId) are linked to each other at the 5′ end, and one or both of the 3′ ends, and are optionally conjugated to a ligand. Each of the agents can target the same gene or two different genes; or each of the agents can target same gene at two different target sites.

[0302] In certain embodiments, an RNAi agent of the invention may contain a low number of nucleotides containing a 2′-fluoro modification, e.g., 10 or fewer nucleotides with 2′-fluoro modification. For example, the RNAi agent may contain 10, 9, 8, 7, 6, 5, 4, 3, 2, 1 or 0 nucleotides with a 2′-fluoro modification. In a specific embodiment, the RNAi agent of the invention contains 10 nucleotides with a 2′-fluoro modification, e.g., 4 nucleotides with a 2′-fluoro modification in the sense strand and 6 nucleotides with a 2′-fluoro modification in the antisense strand. In another specific embodiment, the RNAi agent of the invention contains 6 nucleotides with a 2′-fluoro modification, e.g., 4 nucleotides with a 2′-fluoro modification in the sense strand and 2 nucleotides with a 2′-fluoro modification in the antisense strand.

[0303] In other embodiments, an RNAi agent of the invention may contain an ultra low number of nucleotides containing a 2′-fluoro modification, e.g., 2 or fewer nucleotides containing a 2′-fluoro modification. For example, the RNAi agent may contain 2, 1 of 0 nucleotides with a 2′-fluoro modification. In a specific embodiment, the RNAi agent may contain 2 nucleotides with a 2′-fluoro modification, e.g., 0 nucleotides with a 2-fluoro modification in the sense strand and 2 nucleotides with a 2′-fluoro modification in the antisense strand.

[0304] Various publications describe multimeric iRNAs that can be used in the methods of the invention. Such publications include WO2007/091269, U.S. Pat. No. 7,858,769, WO2010/141511, WO2007/117686, WO2009/014887, and WO2011/031520 the entire contents of each of which are hereby incorporated herein by reference.

[0305] In certain embodiments, the compositions and methods of the disclosure include a vinyl phosphonate (VP) modification of an RNAi agent as described herein. In exemplary embodiments, a vinyl phosphonate of the disclosure has the following structure:

[chemical structure]

[0306] A vinyl phosphonate of the instant disclosure may be attached to either the antisense or the sense strand of a dsRNA of the disclosure. In certain preferred embodiments, a vinyl phosphonate of the instant disclosure is attached to the antisense strand of a dsRNA, optionally at the 5′ end of the antisense strand of the dsRNA.

[0307] Vinyl phosphate modifications are also contemplated for the compositions and methods of the instant disclosure. An exemplary vinyl phosphate structure is:

[chemical structure]

[0308] As described in more detail below, the iRNA that contains conjugations of one or more carbohydrate moieties to an iRNA can optimize one or more properties of the iRNA. In many cases, the carbohydrate moiety will be attached to a modified subunit of the iRNA. For example, the ribose sugar of one or more ribonucleotide subunits of a iRNA can be replaced with another moiety, e.g., a non-carbohydrate (preferably cyclic) carrier to which is attached a carbohydrate ligand. A ribonucleotide subunit in which the ribose sugar of the subunit has been so replaced is referred to herein as a ribose replacement modification subunit (RRMS). A cyclic carrier may be a carbocyclic ring system, i.e., all ring atoms are carbon atoms, or a heterocyclic ring system, i.e., one or more ring atoms may be a heteroatom, e.g., nitrogen, oxygen, sulfur. The cyclic carrier may be a monocyclic ring system, or may contain two or more rings, e.g. fused rings. The cyclic carrier may be a fully saturated ring system, or it may contain one or more double bonds.

[0309] The ligand may be attached to the polynucleotide via a carrier. The carriers include (i) at least one “backbone attachment point,” preferably two “backbone attachment points” and (ii) at least one “tethering attachment point.” A “backbone attachment point” as used herein refers to a functional group, e.g. a hydroxyl group, or generally, a bond available for, and that is suitable for incorporation of the carrier into the backbone, e.g., the phosphate, or modified phosphate, e.g., sulfur containing, backbone, of a ribonucleic acid. A “tethering attachment point” (TAP) in some embodiments refers to a constituent ring atom of the cyclic carrier, e.g., a carbon atom or a heteroatom (distinct from an atom which provides a backbone attachment point), that connects a selected moiety. The moiety can be, e.g., a carbohydrate, e.g. monosaccharide, disaccharide, trisaccharide, tetrasaccharide, oligosaccharide, or polysaccharide. Optionally, the selected moiety is connected by an intervening tether to the cyclic carrier. Thus, the cyclic carrier will often include a functional group, e.g., an amino group, or generally, provide a bond, that is suitable for incorporation or tethering of another chemical entity, e.g., a ligand to the constituent ring.

[0310] The iRNA may be conjugated to a ligand via a carrier, wherein the carrier can be cyclic group or acyclic group; preferably, the cyclic group is selected from pyrrolidinyl, pyrazolinyl, pyrazolidinyl, imidazolinyl, imidazolidinyl, piperidinyl, piperazinyl, [1,3]dioxolane, oxazolidinyl, isoxazolidinyl, morpholinyl, thiazolidinyl, isothiazolidinyl, quinoxalinyl, pyridazinonyl, tetrahydrofuryl, and decalin; preferably, the acyclic group is a serinol backbone or diethanolamine backbone.

i. Thermally Destabilizing Modifications

[0311] In certain embodiments, a dsRNA molecule can be optimized for RNA interference by incorporating thermally destabilizing modifications in the seed region of the antisense strand (i.e., at positions 2-9 of the 5′-end of the antisense strand or at positions 2-8 of the 5′-end of the antisense strand) to reduce or inhibit off-target gene silencing. It has been discovered that dsRNAs with an antisense strand comprising at least one thermally destabilizing modification of the duplex within the first 9 nucleotide positions, counting from the 5′ end, of the antisense strand have reduced off-target gene silencing activity. Accordingly, in some embodiments, the antisense strand comprises at least one (e.g., one, two, three, four, five or more) thermally destabilizing modification of the duplex within the first 9 nucleotide positions of the 5′ region of the antisense strand. In some embodiments, one or more thermally destabilizing modification(s) of the duplex is/are located in positions 2-9, 2-8, or preferably positions 4-8, from the 5′-end of the antisense strand. In some further embodiments, the thermally destabilizing modification(s) of the duplex is/are located at position 6, 7 or 8 from the 5′-end of the antisense strand. In still some further embodiments, the thermally destabilizing modification of the duplex is located at position 7 from the 5′-end of the antisense strand. The term “thermally destabilizing modification(s)” includes modification(s) that would result with a dsRNA with a lower overall melting temperature (Tm) (preferably a Tm with one, two, three or four degrees lower than the Tm of the dsRNA without having such modification(s). In some embodiments, the thermally destabilizing modification of the duplex is located at position 2, 3, 4, 5 or 9 from the 5′-end of the antisense strand.

[0312] An iRNA agent comprises a sense strand and an antisense strand, each strand having 14 to 40 nucleotides. The RNAi agent may be represented by formula (L):

[chemical structure]

[0313] In formula (L), B1, B2, B3, B1′, B2′, B3′, and B4′ each are independently a nucleotide containing a modification selected from the group consisting of 2′-O-alkyl, 2′-substituted alkoxy, 2′-substituted alkyl, 2′-halo, ENA, and BNA/LNA. In one embodiment, B1, B2, B3, B1′, B2′, B3′, and B4′ each contain 2′-OMe modifications. In one embodiment, B1, B2, B3, B1′, B2′, B3′, and B4′ each contain 2′-OMe or 2′-F modifications. In one embodiment, at least one of B1, B2, B3, B1′, B2′, B3′, and B4′ contain 2′-O—N-methylacetamido (2′-O-NMA) modification.

[0314] C1 is a thermally destabilizing nucleotide placed at a site opposite to the seed region of the antisense strand (i.e., at positions 2-8 of the 5′-end of the antisense strand or at positions 2-9 of the 5′-end of the antisense strand). For example, C1 is at a position of the sense strand that pairs with a nucleotide at positions 2-8 of the 5′-end of the antisense strand. In one example, C1 is at position 15 from the 5′-end of the sense strand. C1 nucleotide bears the thermally destabilizing modification which can include abasic modification; mismatch with the opposing nucleotide in the duplex; and sugar modification such as 2′-deoxy modification or acyclic nucleotide e.g., unlocked nucleic acids (UNA) or glycerol nucleic acid (GNA). In one embodiment, C1 has thermally destabilizing modification selected from the group consisting of: i) mismatch with the opposing nucleotide in the antisense strand; ii) abasic modification selected from the group consisting of:

[chemical structure]

and iii) sugar modification selected from the group consisting of:

[chemical structure]

wherein B is a modified or unmodified nucleobase, R¹ and R² independently are H, halogen, OR₃, or alkyl; and R₃ is H, alkyl, cycloalkyl, aryl, aralkyl, heteroaryl or sugar. In one embodiment, the thermally destabilizing modification in C1 is a mismatch selected from the group consisting of G:G, G:A, G:U, G:T, A:A, A:C, C:C, C:U, C:T, U:U, T:T, and U:T; and optionally, at least one nucleobase in the mismatch pair is a 2′-deoxy nucleobase. In one example, the thermally destabilizing modification in C1 is GNA or

[chemical structure]

[0315] T1, T1′, T2′, and T3′ each independently represent a nucleotide comprising a modification providing the nucleotide a steric bulk that is less or equal to the steric bulk of a 2′-OMe modification. A steric bulk refers to the sum of steric effects of a modification. Methods for determining steric effects of a modification of a nucleotide are known to one skilled in the art. The modification can be at the 2′ position of a ribose sugar of the nucleotide, or a modification to a non-ribose nucleotide, acyclic nucleotide, or the backbone of the nucleotide that is similar or equivalent to the 2′ position of the ribose sugar, and provides the nucleotide a steric bulk that is less than or equal to the steric bulk of a 2′-OMe modification. For example, T1, T1′, T2′, and T3′ are each independently selected from DNA, RNA, LNA, 2′-F, and 2′-F-5′-methyl. In one embodiment, T1 is DNA. In one embodiment, T1′ is DNA, RNA or LNA. In one embodiment, T2′ is DNA or RNA. In one embodiment, T3′ is DNA or RNA.
[0316] n¹, n³, and q¹ are independently 4 to 15 nucleotides in length.
[0317] n⁵, q³, and q⁷ are independently 1-6 nucleotide(s) in length.
[0318] n⁴, q², and q⁶ are independently 1-3 nucleotide(s) in length; alternatively, n⁴ is 0.
[0319] q⁵ is independently 0-10 nucleotide(s) in length.
[0320] n² and q⁴ are independently 0-3 nucleotide(s) in length.

[0321] Alternatively, n⁴ is 0-3 nucleotide(s) in length.

[0322] In one embodiment, n⁴ can be 0. In one example, n⁴ is 0, and q² and q⁶ are 1. In another example, n⁴ is 0, and q² and q⁶ are 1, with two phosphorothioate internucleotide linkage modifications within position 1-5 of the sense strand (counting from the 5′-end of the sense strand), and two phosphorothioate internucleotide linkage modifications at positions 1 and 2 and two phosphorothioate internucleotide linkage modifications within positions 18-23 of the antisense strand (counting from the 5′-end of the antisense strand).

[0323] In one embodiment, n⁴, q², and q⁶ are each 1.

[0324] In one embodiment, n², n⁴, q², q⁴, and q⁶ are each 1.

[0325] In one embodiment, C1 is at position 14-17 of the 5′-end of the sense strand, when the sense strand is 19-22 nucleotides in length, and n⁴ is 1. In one embodiment, C1 is at position 15 of the 5′-end of the sense strand

[0326] In one embodiment, T3′ starts at position 2 from the 5′ end of the antisense strand. In one example, T3′ is at position 2 from the 5′ end of the antisense strand and q⁶ is equal to 1.

[0327] In one embodiment, T1′ starts at position 14 from the 5′ end of the antisense strand. In one example, T1′ is at position 14 from the 5′ end of the antisense strand and q² is equal to 1.

[0328] In an exemplary embodiment, T3′ starts from position 2 from the 5′ end of the antisense strand and T1′ starts from position 14 from the 5′ end of the antisense strand. In one example, T3′ starts from position 2 from the 5′ end of the antisense strand and q⁶ is equal to 1 and T1′ starts from position 14 from the 5′ end of the antisense strand and q² is equal to 1.

[0329] In one embodiment, T1′ and T3′ are separated by 11 nucleotides in length (i.e. not counting the T1′ and T3′ nucleotides).

[0330] In one embodiment, T1′ is at position 14 from the 5′ end of the antisense strand. In one example, T1′ is at position 14 from the 5′ end of the antisense strand and q² is equal to 1, and the modification at the 2′ position or positions in a non-ribose, acyclic or backbone that provide less steric bulk than a 2′-OMe ribose.

[0331] In one embodiment, T3′ is at position 2 from the 5′ end of the antisense strand. In one example, T3′ is at position 2 from the 5′ end of the antisense strand and q⁶ is equal to 1, and the modification at the 2′ position or positions in a non-ribose, acyclic or backbone that provide less than or equal to steric bulk than a 2′-OMe ribose.

[0332] In one embodiment, T1 is at the cleavage site of the sense strand. In one example, T1 is at position 11 from the 5′ end of the sense strand, when the sense strand is 19-22 nucleotides in length, and n² is 1. In an exemplary embodiment, T1 is at the cleavage site of the sense strand at position 11 from the 5′ end of the sense strand, when the sense strand is 19-22 nucleotides in length, and n² is 1, In one embodiment, T2′ starts at position 6 from the 5′ end of the antisense strand. In one example, T2′ is at positions 6-10 from the 5′ end of the antisense strand, and q⁴ is 1.

[0333] In an exemplary embodiment, T1 is at the cleavage site of the sense strand, for instance, at position 11 from the 5′ end of the sense strand, when the sense strand is 19-22 nucleotides in length, and n² is 1; T1′ is at position 14 from the 5′ end of the antisense strand, and q² is equal to 1, and the modification to T1′ is at the 2′ position of a ribose sugar or at positions in a non-ribose, acyclic or backbone that provide less steric bulk than a 2′-OMe ribose; T2′ is at positions 6-10 from the 5′ end of the antisense strand, and q⁴ is 1; and T3′ is at position 2 from the 5′ end of the antisense strand, and q⁶ is equal to 1, and the modification to T3′ is at the 2′ position or at positions in a non-ribose, acyclic or backbone that provide less than or equal to steric bulk than a 2′-OMe ribose.

[0334] In one embodiment, T2′ starts at position 8 from the 5′ end of the antisense strand. In one example, T2′ starts at position 8 from the 5′ end of the antisense strand, and q⁴ is 2.

[0335] In one embodiment, T2′ starts at position 9 from the 5′ end of the antisense strand. In one example, T2′ is at position 9 from the 5′ end of the antisense strand, and q⁴ is 1.

[0336] In one embodiment, B1′ is 2′-OMe or 2′-F, q¹ is 9, T1′ is 2′-F, q² is 1, B2′ is 2′-OMe or 2′-F, q³ is 4, T2′ is 2′-F, q⁴ is 1, B3′ is 2′-OMe or 2′-F, q⁵ is 6, T3′ is 2′-F, q⁶ is 1, B4′ is 2′-OMe, and q⁷ is 1; with two phosphorothioate internucleotide linkage modifications within positions 1-5 of the sense strand (counting from the 5′-end of the sense strand), and two phosphorothioate internucleotide linkage modifications at positions 1 and 2 and two phosphorothioate internucleotide linkage modifications within positions 18-23 of the antisense strand (counting from the 5′-end of the antisense strand).

[0337] In one embodiment, n⁴ is 0, B3 is 2′-OMe, n⁵ is 3, B1′ is 2′-OMe or 2′-F, q¹ is 9, T1′ is 2′-F, q² is 1, B2′ is 2′-OMe or 2′-F, q³ is 4, T2′ is 2′-F, q⁴ is 1, B3′ is 2′-OMe or 2′-F, q⁵ is 6, T3′ is 2′-F, q⁶ is 1, B4′ is 2′-OMe, and q⁷ is 1; with two phosphorothioate internucleotide linkage modifications within positions 1-5 of the sense strand (counting from the 5′-end of the sense strand), and two phosphorothioate internucleotide linkage modifications at positions 1 and 2 and two phosphorothioate internucleotide linkage modifications within positions 18-23 of the antisense strand (counting from the 5′-end of the antisense strand).

[0338] In one embodiment, B1 is 2′-OMe or 2′-F, n¹ is 8, T1 is 2′F, n² is 3, B2 is 2′-OMe, n³ is 7, n⁴ is 0, B3 is 2′OMe, n⁵ is 3, B1′ is 2′-OMe or 2′-F, q¹ is 9, T1′ is 2′-F, q² is 1, B2′ is 2′-OMe or 2′-F, q³ is 4, T2′ is 2′-F, q⁴ is 2, B3′ is 2′-OMe or 2′-F, q⁵ is 5, T3′ is 2′-F, q⁶ is 1, B4′ is 2′-OMe, and q⁷ is 1.

[0339] In one embodiment, B1 is 2′-OMe or 2′-F, n¹ is 8, T1 is 2′F, n² is 3, B2 is 2′-OMe, n³ is 7, n⁴ is 0, B3 is 2′-OMe, n⁵ is 3, B1′ is 2′-OMe or 2′-F, q¹ is 9, T1′ is 2′-F, q² is 1, B2′ is 2′-OMe or 2′-F, q³ is 4, T2′ is 2′-F, q⁴ is 2, B3′ is 2′-OMe or 2′-F, q⁵ is 5, T3′ is 2′-F, q⁶ is 1, B4′ is 2′-OMe, and q⁷ is 1; with two phosphorothioate internucleotide linkage modifications within positions 1-5 of the sense strand (counting from the 5′-end of the sense strand), and two phosphorothioate internucleotide linkage modifications at positions 1 and 2 and two phosphorothioate internucleotide linkage modifications within positions 18-23 of the antisense strand (counting from the 5′-end of the antisense strand).

[0340] In one embodiment, B1 is 2′-OMe or 2′-F, n¹ is 6, T1 is 2′F, n² is 3, B2 is 2′-OMe, n³ is 7, n⁴ is 0, B3 is 2′OMe, n⁵ is 3, B1′ is 2′-OMe or 2′-F, q¹ is 7, T1′ is 2′-F, q² is 1, B2′ is 2′-OMe or 2′-F, q³ is 4, T2′ is 2′-F, q⁴ is 2, B3′ is 2′-OMe or 2′-F, q⁵ is 5, T3′ is 2′-F, q⁶ is 1, B4′ is 2′-OMe, and q⁷ is 1.

[0341] In one embodiment, B1 is 2′-OMe or 2′-F, n¹ is 6, T1 is 2′F, n² is 3, B2 is 2′-OMe, n³ is 7, n⁴ is 0, B3 is 2′-OMe, n⁵ is 3, B1′ is 2′-OMe or 2′-F, q¹ is 7, T1′ is 2′-F, q² is 1, B2′ is 2′-OMe or 2′-F, q³ is 4, T2′ is 2′-F, q⁴ is 2, B3′ is 2′-OMe or 2′-F, q⁵ is 5, T3′ is 2′-F, q⁶ is 1, B4′ is 2′-OMe, and q⁷ is 1; with two phosphorothioate internucleotide linkage modifications within positions 1-5 of the sense strand (counting from the 5′-end of the sense strand), and two phosphorothioate internucleotide linkage modifications at positions 1 and 2 and two phosphorothioate internucleotide linkage modifications within positions 18-23 of the antisense strand (counting from the 5′-end of the antisense strand).

[0342] In one embodiment, B1 is 2′-OMe or 2′-F, n¹ is 8, T1 is 2′F, n² is 3, B2 is 2′-OMe, n³ is 7, n⁴ is 0, B3 is 2′OMe, n⁵ is 3, B1′ is 2′-OMe or 2′-F, q¹ is 9, T1′ is 2′-F, q² is 1, B2′ is 2′-OMe or 2′-F, q³ is 4, T2′ is 2′-F, q⁴ is 1, B3′ is 2′-OMe or 2′-F, q⁵ is 6, T3′ is 2′-F, q⁶ is 1, B4′ is 2′-OMe, and q⁷ is 1.

[0343] In one embodiment, B1 is 2′-OMe or 2′-F, n¹ is 8, T1 is 2′F, n² is 3, B2 is 2′-OMe, n³ is 7, n⁴ is 0, B3 is 2′-OMe, n⁵ is 3, B1′ is 2′-OMe or 2′-F, q¹ is 9, T1′ is 2′-F, q² is 1, B2′ is 2′-OMe or 2′-F, q³ is 4, T2′ is 2′-F, q⁴ is 1, B3′ is 2′-OMe or 2′-F, q⁵ is 6, T3′ is 2′-F, q⁶ is 1, B4′ is 2′-OMe, and q⁷ is 1; with two phosphorothioate internucleotide linkage modifications within positions 1-5 of the sense strand (counting from the 5′-end of the sense strand), and two phosphorothioate internucleotide linkage modifications at positions 1 and 2 and two phosphorothioate internucleotide linkage modifications within positions 18-23 of the antisense strand (counting from the 5′-end of the antisense strand).

[0344] In one embodiment, B1 is 2′-OMe or 2′-F, n¹ is 8, T1 is 2′F, n² is 3, B2 is 2′-OMe, n³ is 7, n⁴ is 0, B3 is 2′OMe, n⁵ is 3, B1′ is 2′-OMe or 2′-F, q¹ is 9, T1′ is 2′-F, q² is 1, B2′ is 2′-OMe or 2′-F, q³ is 5, T2′ is 2′-F, q⁴ is 1, B3′ is 2′-OMe or 2′-F, q⁵ is 5, T3′ is 2′-F, q⁶ is 1, B4′ is 2′-OMe, and q⁷ is 1; optionally with at least 2 additional TT at the 3′-end of the antisense strand.

[0345] In one embodiment, B1 is 2′-OMe or 2′-F, n¹ is 8, T1 is 2′F, n² is 3, B2 is 2′-OMe, n³ is 7, n⁴ is 0, B3 is 2′-OMe, n⁵ is 3, B1′ is 2′-OMe or 2′-F, q¹ is 9, T1′ is 2′-F, q² is 1, B2′ is 2′-OMe or 2′-F, q³ is 5, T2′ is 2′-F, q⁴ is 1, B3′ is 2′-OMe or 2′-F, q⁵ is 5, T3′ is 2′-F, q⁶ is 1, B4′ is 2′-OMe, and q⁷ is 1; optionally with at least 2 additional TT at the 3′-end of the antisense strand; with two phosphorothioate internucleotide linkage modifications within positions 1-5 of the sense strand (counting from the 5′-end of the sense strand), and two phosphorothioate internucleotide linkage modifications at positions 1 and 2 and two phosphorothioate internucleotide linkage modifications within positions 18-23 of the antisense strand (counting from the 5′-end of the antisense strand).

[0346] In one embodiment, B1 is 2′-OMe or 2′-F, n¹ is 8, T1 is 2′F, n² is 3, B2 is 2′-OMe, n³ is 7, n⁴ is 0, B3 is 2′-OMe, n⁵ is 3, B1′ is 2′-OMe or 2′-F, q¹ is 9, T1′ is 2′-F, q² is 1, B2′ is 2′-OMe or 2′-F, q³ is 4, q⁴ is 0, B3′ is 2′-OMe or 2′-F, q⁵ is 7, T3′ is 2′-F, q⁶ is 1, B4′ is 2′-OMe, and q⁷ is 1. In one embodiment, B1 is 2′-OMe or 2′-F, n¹ is 8, T1 is 2′F, n² is 3, B2 is 2′-OMe, n³ is 7, n⁴ is 0, B3 is 2′-OMe, n⁵ is 3, B1′ is 2′-OMe or 2′-F, q¹ is 9, T1′ is 2′-F, q² is 1, B2′ is 2′-OMe or 2′-F, q³ is 4, q⁴ is 0, B3′ is 2′-OMe or 2′-F, q⁵ is 7, T3′ is 2′-F, q⁶ is 1, B4′ is 2′-OMe, and q⁷ is 1; with two phosphorothioate internucleotide linkage modifications within positions 1-5 of the sense strand (counting from the 5′-end), and two phosphorothioate internucleotide linkage modifications at positions 1 and 2 and two phosphorothioate internucleotide linkage modifications within positions 18-23 of the antisense strand (counting from the 5′-end).

[0347] In one embodiment, B1 is 2′-OMe or 2′-F, n¹ is 8, T1 is 2′F, n² is 3, B2 is 2′-OMe, n³ is 7, n⁴ is 0, B3 is 2′OMe, n⁵ is 3, B1′ is 2′-OMe or 2′-F, q¹ is 9, T1′ is 2′-F, q² is 1, B2′ is 2′-OMe or 2′-F, q³ is 4, T2′ is 2′-F, q⁴ is 2, B3′ is 2′-OMe or 2′-F, q⁵ is 5, T3′ is 2′-F, q⁶ is 1, B4′ is 2′-F, and q⁷ is 1. In one embodiment, B1 is 2′-OMe or 2′-F, n¹ is 8, T1 is 2′F, n² is 3, B2 is 2′-OMe, n³ is 7, n⁴ is 0, B3 is 2′-OMe, n⁵ is 3, B1′ is 2′-OMe or 2′-F, q¹ is 9, T1′ is 2′-F, q² is 1, B2′ is 2′-OMe or 2′-F, q³ is 4, T2′ is 2′-F, q⁴ is 2, B3′ is 2′-OMe or 2′-F, q⁵ is 5, T3′ is 2′-F, q⁶ is 1, B4′ is 2′-F, and q⁷ is 1; with two phosphorothioate internucleotide linkage modifications within positions 1-5 of the sense strand (counting from the 5′-end of the sense strand), and two phosphorothioate internucleotide linkage modifications at positions 1 and 2 and two phosphorothioate internucleotide linkage modifications within positions 18-23 of the antisense strand (counting from the 5′-end of the antisense strand).

[0348] In one embodiment, B1 is 2′-OMe or 2′-F, n¹ is 8, T1 is 2′F, n² is 3, B2 is 2′-OMe, n³ is 7, n⁴ is 0, B3 is 2′-OMe, n⁵ is 3, B1′ is 2′-OMe or 2′-F, q¹ is 9, T1′ is 2′-F, q² is 1, B2′ is 2′-OMe or 2′-F, q³ is 4, q⁴ is 0, B3′ is 2′-OMe or 2′-F, q⁵ is 7, T3′ is 2′-F, q⁶ is 1, B4′ is 2′-F, and q⁷ is 1. In one embodiment, B1 is 2′-OMe or 2′-F, n¹ is 8, T1 is 2′F, n² is 3, B2 is 2′-OMe, n³ is 7, n⁴ is 0, B3 is 2′-OMe, n⁵ is 3, B1′ is 2′-OMe or 2′-F, q¹ is 9, T1′ is 2′-F, q² is 1, B2′ is 2′-OMe or 2′-F, q³ is 4, q⁴ is 0, B3′ is 2′-OMe or 2′-F, q⁵ is 7, T3′ is 2′-F, q⁶ is 1, B4′ is 2′-F, and q⁷ is 1; with two phosphorothioate internucleotide linkage modifications within positions 1-5 of the sense strand (counting from the 5′-end of the sense strand), and two phosphorothioate internucleotide linkage modifications at positions 1 and 2 and two phosphorothioate internucleotide linkage modifications within positions 18-23 of the antisense strand (counting from the 5′-end of the antisense strand).

[0349] The RNAi agent can comprise a phosphorus-containing group at the 5′-end of the sense strand or antisense strand. The 5′-end phosphorus-containing group can be 5′-end phosphate (5′-P), 5′-end phosphorothioate (5′-PS), 5′-end phosphorodithioate (5′-PS₂), 5′-end vinylphosphonate (5′-VP), 5′-end methylphosphonate (MePhos), or 5′-deoxy-5′-C-malonyl

[chemical structure]

When the 5′-end phosphorus-containing group is 5′-end vinylphosphonate (5′-VP), the 5′-VP can be either 5′-E-VP isomer (i.e., trans-vinylphosphate,

[chemical structure]

5′-Z-VP isomer (i.e., cis-vinylphosphate,

[chemical structure]

or mixtures thereof.

[0350] In one embodiment, the RNAi agent comprises a phosphorus-containing group at the 5′-end of the sense strand. In one embodiment, the RNAi agent comprises a phosphorus-containing group at the 5′-end of the antisense strand.

[0351] In one embodiment, the RNAi agent comprises a 5′-P. In one embodiment, the RNAi agent comprises a 5′-P in the antisense strand.

[0352] In one embodiment, the RNAi agent comprises a 5′-PS. In one embodiment, the RNAi agent comprises a 5′-PS in the antisense strand.

[0353] In one embodiment, the RNAi agent comprises a 5′-VP. In one embodiment, the RNAi agent comprises a 5′-VP in the antisense strand. In one embodiment, the RNAi agent comprises a 5′-E-VP in the antisense strand. In one embodiment, the RNAi agent comprises a 5′-Z-VP in the antisense strand.

[0354] In one embodiment, the RNAi agent comprises a 5′-PS₂. In one embodiment, the RNAi agent comprises a 5′-PS₂ in the antisense strand.

[0355] In one embodiment, the RNAi agent comprises a 5′-PS₂. In one embodiment, the RNAi agent comprises a 5′-deoxy-5′-C-malonyl in the antisense strand.

[0356] In one embodiment, B1 is 2′-OMe or 2′-F, n¹ is 8, T1 is 2′F, n² is 3, B2 is 2′-OMe, n³ is 7, n⁴ is 0, B3 is 2′OMe, n⁵ is 3, B1′ is 2′-OMe or 2′-F, q¹ is 9, T1′ is 2′-F, q² is 1, B2′ is 2′-OMe or 2′-F, q³ is 4, T2′ is 2′-F, q⁴ is 2, B3′ is 2′-OMe or 2′-F, q⁵ is 5, T3′ is 2′-F, q⁶ is 1, B4′ is 2′-OMe, and q⁷ is 1. The RNAi agent also comprises a 5′-PS.

[0357] In one embodiment, B1 is 2′-OMe or 2′-F, n¹ is 8, T1 is 2′F, n² is 3, B2 is 2′-OMe, n³ is 7, n⁴ is 0, B3 is 2′OMe, n⁵ is 3, B1′ is 2′-OMe or 2′-F, q¹ is 9, T1′ is 2′-F, q² is 1, B2′ is 2′-OMe or 2′-F, q³ is 4, T2′ is 2′-F, q⁴ is 2, B3′ is 2′-OMe or 2′-F, q⁵ is 5, T3′ is 2′-F, q⁶ is 1, B4′ is 2′-OMe, and q⁷ is 1. The RNAi agent also comprises a 5′-P.

[0358] In one embodiment, B1 is 2′-OMe or 2′-F, n¹ is 8, T1 is 2′F, n² is 3, B2 is 2′-OMe, n³ is 7, n⁴ is 0, B3 is 2′OMe, n⁵ is 3, B1′ is 2′-OMe or 2′-F, q¹ is 9, T1′ is 2′-F, q² is 1, B2′ is 2′-OMe or 2′-F, q³ is 4, T2′ is 2′-F, q⁴ is 2, B3′ is 2′-OMe or 2′-F, q⁵ is 5, T3′ is 2′-F, q⁶ is 1, B4′ is 2′-OMe, and q⁷ is 1. The RNAi agent also comprises a 5′-VP. The 5′-VP may be 5′-E-VP, 5′-Z-VP, or combination thereof.

[0359] In one embodiment, B1 is 2′-OMe or 2′-F, n¹ is 8, T1 is 2′F, n² is 3, B2 is 2′-OMe, n³ is 7, n⁴ is 0, B3 is 2′OMe, n⁵ is 3, B1′ is 2′-OMe or 2′-F, q¹ is 9, T1′ is 2′-F, q² is 1, B2′ is 2′-OMe or 2′-F, q³ is 4, T2′ is 2′-F, q⁴ is 2, B3′ is 2′-OMe or 2′-F, q⁵ is 5, T3′ is 2′-F, q⁶ is 1, B4′ is 2′-OMe, and q⁷ is 1. The RNAi agent also comprises a 5′-PS₂.

[0360] In one embodiment, B1 is 2′-OMe or 2′-F, n¹ is 8, T1 is 2′F, n² is 3, B2 is 2′-OMe, n³ is 7, n⁴ is 0, B3 is 2′OMe, n⁵ is 3, B1′ is 2′-OMe or 2′-F, q¹ is 9, T1′ is 2′-F, q² is 1, B2′ is 2′-OMe or 2′-F, q³ is 4, T2′ is 2′-F, q⁴ is 2, B3′ is 2′-OMe or 2′-F, q⁵ is 5, T3′ is 2′-F, q⁶ is 1, B4′ is 2′-OMe, and q⁷ is 1. The RNAi agent also comprises a 5′-deoxy-5′-C-malonyl.

[0361] In one embodiment, B1 is 2′-OMe or 2′-F, n¹ is 8, T1 is 2′F, n² is 3, B2 is 2′-OMe, n³ is 7, n⁴ is 0, B3 is 2′-OMe, n⁵ is 3, B1′ is 2′-OMe or 2′-F, q¹ is 9, T1′ is 2′-F, q² is 1, B2′ is 2′-OMe or 2′-F, q³ is 4, T2′ is 2′-F, q⁴ is 2, B3′ is 2′-OMe or 2′-F, q⁵ is 5, T3′ is 2′-F, q⁶ is 1, B4′ is 2′-OMe, and q⁷ is 1; with two phosphorothioate internucleotide linkage modifications within position 1-5 of the sense strand (counting from the 5′-end of the sense strand), and two phosphorothioate internucleotide linkage modifications at positions 1 and 2 and two phosphorothioate internucleotide linkage modifications within positions 18-23 of the antisense strand (counting from the 5′-end of the antisense strand). The RNAi agent also comprises a 5′-P.

[0362] In one embodiment, B1 is 2′-OMe or 2′-F, n¹ is 8, T1 is 2′F, n² is 3, B2 is 2′-OMe, n³ is 7, n⁴ is 0, B3 is 2′-OMe, n⁵ is 3, B1′ is 2′-OMe or 2′-F, q¹ is 9, T1′ is 2′-F, q² is 1, B2′ is 2′-OMe or 2′-F, q³ is 4, T2′ is 2′-F, q⁴ is 2, B3′ is 2′-OMe or 2′-F, q⁵ is 5, T3′ is 2′-F, q⁶ is 1, B4′ is 2′-OMe, and q⁷ is 1; with two phosphorothioate internucleotide linkage modifications within position 1-5 of the sense strand (counting from the 5′-end of the sense strand), and two phosphorothioate internucleotide linkage modifications at positions 1 and 2 and two phosphorothioate internucleotide linkage modifications within positions 18-23 of the antisense strand (counting from the 5′-end of the antisense strand). The RNAi agent also comprises a 5′-PS.

[0363] In one embodiment, B1 is 2′-OMe or 2′-F, n¹ is 8, T1 is 2′F, n² is 3, B2 is 2′-OMe, n³ is 7, n⁴ is 0, B3 is 2′-OMe, n⁵ is 3, B1′ is 2′-OMe or 2′-F, q¹ is 9, T1′ is 2′-F, q² is 1, B2′ is 2′-OMe or 2′-F, q³ is 4, T2′ is 2′-F, q⁴ is 2, B3′ is 2′-OMe or 2′-F, q⁵ is 5, T3′ is 2′-F, q⁶ is 1, B4′ is 2′-OMe, and q⁷ is 1; with two phosphorothioate internucleotide linkage modifications within position 1-5 of the sense strand (counting from the 5′-end of the sense strand), and two phosphorothioate internucleotide linkage modifications at positions 1 and 2 and two phosphorothioate internucleotide linkage modifications within positions 18-23 of the antisense strand (counting from the 5′-end of the antisense strand). The RNAi agent also comprises a 5′-VP. The 5′-VP may be 5′-E-VP, 5′-Z-VP, or combination thereof.

[0364] In one embodiment, B1 is 2′-OMe or 2′-F, n¹ is 8, T1 is 2′F, n² is 3, B2 is 2′-OMe, n³ is 7, n⁴ is 0, B3 is 2′-OMe, n⁵ is 3, B1′ is 2′-OMe or 2′-F, q¹ is 9, T1′ is 2′-F, q² is 1, B2′ is 2′-OMe or 2′-F, q³ is 4, T2′ is 2′-F, q⁴ is 2, B3′ is 2′-OMe or 2′-F, q⁵ is 5, T3′ is 2′-F, q⁶ is 1, B4′ is 2′-OMe, and q⁷ is 1; with two phosphorothioate internucleotide linkage modifications within position 1-5 of the sense strand (counting from the 5′-end of the sense strand), and two phosphorothioate internucleotide linkage modifications at positions 1 and 2 and two phosphorothioate internucleotide linkage modifications within positions 18-23 of the antisense strand (counting from the 5′-end of the antisense strand). The RNAi agent also comprises a 5′-PS₂.

[0365] In one embodiment, B1 is 2′-OMe or 2′-F, n¹ is 8, T1 is 2′F, n² is 3, B2 is 2′-OMe, n³ is 7, n⁴ is 0, B3 is 2′-OMe, n⁵ is 3, B1′ is 2′-OMe or 2′-F, q¹ is 9, T1′ is 2′-F, q² is 1, B2′ is 2′-OMe or 2′-F, q³ is 4, T2′ is 2′-F, q⁴ is 2, B3′ is 2′-OMe or 2′-F, q⁵ is 5, T3′ is 2′-F, q⁶ is 1, B4′ is 2′-OMe, and q⁷ is 1; with two phosphorothioate internucleotide linkage modifications within position 1-5 of the sense strand (counting from the 5′-end of the sense strand), and two phosphorothioate internucleotide linkage modifications at positions 1 and 2 and two phosphorothioate internucleotide linkage modifications within positions 18-23 of the antisense strand (counting from the 5′-end of the antisense strand). The RNAi agent also comprises a 5′-deoxy-5′-C-malonyl.

[0366] In one embodiment, B1 is 2′-OMe or 2′-F, n¹ is 8, T1 is 2′F, n² is 3, B2 is 2′-OMe, n³ is 7, n⁴ is 0, B3 is 2′-OMe, n⁵ is 3, B1′ is 2′-OMe or 2′-F, q¹ is 9, T1′ is 2′-F, q² is 1, B2′ is 2′-OMe or 2′-F, q³ is 4, q⁴ is 0, B3′ is 2′-OMe or 2′-F, q⁵ is 7, T3′ is 2′-F, q⁶ is 1, B4′ is 2′-OMe, and q⁷ is 1. The RNAi agent also comprises a 5′-P.

[0367] In one embodiment, B1 is 2′-OMe or 2′-F, n¹ is 8, T1 is 2′F, n² is 3, B2 is 2′-OMe, n³ is 7, n⁴ is 0, B3 is 2′-OMe, n⁵ is 3, B1′ is 2′-OMe or 2′-F, q¹ is 9, T1′ is 2′-F, q² is 1, B2′ is 2′-OMe or 2′-F, q³ is 4, q⁴ is 0, B3′ is 2′-OMe or 2′-F, q⁵ is 7, T3′ is 2′-F, q⁶ is 1, B4′ is 2′-OMe, and q⁷ is 1. The dsRNA agent also comprises a 5′-PS.

[0368] In one embodiment, B1 is 2′-OMe or 2′-F, n¹ is 8, T1 is 2′F, n² is 3, B2 is 2′-OMe, n³ is 7, n⁴ is 0, B3 is 2′-OMe, n⁵ is 3, B1′ is 2′-OMe or 2′-F, q¹ is 9, T1′ is 2′-F, q² is 1, B2′ is 2′-OMe or 2′-F, q³ is 4, q⁴ is 0, B3′ is 2′-OMe or 2′-F, q⁵ is 7, T3′ is 2′-F, q⁶ is 1, B4′ is 2′-OMe, and q⁷ is 1. The RNAi agent also comprises a 5′-VP. The 5′-VP may be 5′-E-VP, 5′-Z-VP, or combination thereof.

[0369] In one embodiment, B1 is 2′-OMe or 2′-F, n¹ is 8, T1 is 2′F, n² is 3, B2 is 2′-OMe, n³ is 7, n⁴ is 0, B3 is 2′-OMe, n⁵ is 3, B1′ is 2′-OMe or 2′-F, q¹ is 9, T1′ is 2′-F, q² is 1, B2′ is 2′-OMe or 2′-F, q³ is 4, q⁴ is 0, B3′ is 2′-OMe or 2′-F, q⁵ is 7, T3′ is 2′-F, q⁶ is 1, B4′ is 2′-OMe, and q⁷ is 1. The RNAi agent also comprises a 5′-PS₂.

[0370] In one embodiment, B1 is 2′-OMe or 2′-F, n¹ is 8, T1 is 2′F, n² is 3, B2 is 2′-OMe, n³ is 7, n⁴ is 0, B3 is 2′-OMe, n⁵ is 3, B1′ is 2′-OMe or 2′-F, q¹ is 9, T1′ is 2′-F, q² is 1, B2′ is 2′-OMe or 2′-F, q³ is 4, q⁴ is 0, B3′ is 2′-OMe or 2′-F, q⁵ is 7, T3′ is 2′-F, q⁶ is 1, B4′ is 2′-OMe, and q⁷ is 1. The RNAi agent also comprises a 5′-deoxy-5′-C-malonyl.

[0371] In one embodiment, B1 is 2′-OMe or 2′-F, n¹ is 8, T1 is 2′F, n² is 3, B2 is 2′-OMe, n³ is 7, n⁴ is 0, B3 is 2′-OMe, n⁵ is 3, B1′ is 2′-OMe or 2′-F, q¹ is 9, T1′ is 2′-F, q² is 1, B2′ is 2′-OMe or 2′-F, q³ is 4, q⁴ is 0, B3′ is 2′-OMe or 2′-F, q⁵ is 7, T3′ is 2′-F, q⁶ is 1, B4′ is 2′-OMe, and q⁷ is 1; with two phosphorothioate internucleotide linkage modifications within position 1-5 of the sense strand (counting from the 5′-end), and two phosphorothioate internucleotide linkage modifications at positions 1 and 2 and two phosphorothioate internucleotide linkage modifications within positions 18-23 of the antisense strand (counting from the 5′-end). The RNAi agent also comprises a 5′-P.

[0372] In one embodiment, B1 is 2′-OMe or 2′-F, n¹ is 8, T1 is 2′F, n² is 3, B2 is 2′-OMe, n³ is 7, n⁴ is 0, B3 is 2′-OMe, n⁵ is 3, B1′ is 2′-OMe or 2′-F, q¹ is 9, T1′ is 2′-F, q² is 1, B2′ is 2′-OMe or 2′-F, q³ is 4, q⁴ is 0, B3′ is 2′-OMe or 2′-F, q⁵ is 7, T3′ is 2′-F, q⁶ is 1, B4′ is 2′-OMe, and q⁷ is 1; with two phosphorothioate internucleotide linkage modifications within position 1-5 of the sense strand (counting from the 5′-end), and two phosphorothioate internucleotide linkage modifications at positions 1 and 2 and two phosphorothioate internucleotide linkage modifications within positions 18-23 of the antisense strand (counting from the 5′-end). The RNAi agent also comprises a 5′-PS.

[0373] In one embodiment, B1 is 2′-OMe or 2′-F, n¹ is 8, T1 is 2′F, n² is 3, B2 is 2′-OMe, n³ is 7, n⁴ is 0, B3 is 2′-OMe, n⁵ is 3, B1′ is 2′-OMe or 2′-F, q¹ is 9, T1′ is 2′-F, q² is 1, B2′ is 2′-OMe or 2′-F, q³ is 4, q⁴ is 0, B3′ is 2′-OMe or 2′-F, q⁵ is 7, T3′ is 2′-F, q⁶ is 1, B4′ is 2′-OMe, and q⁷ is 1; with two phosphorothioate internucleotide linkage modifications within position 1-5 of the sense strand (counting from the 5′-end), and two phosphorothioate internucleotide linkage modifications at positions 1 and 2 and two phosphorothioate internucleotide linkage modifications within positions 18-23 of the antisense strand (counting from the 5′-end). The RNAi agent also comprises a 5′-VP. The 5′-VP may be 5′-E-VP, 5′-Z-VP, or combination thereof.

[0374] In one embodiment, B1 is 2′-OMe or 2′-F, n¹ is 8, T1 is 2′F, n² is 3, B2 is 2′-OMe, n³ is 7, n⁴ is 0, B3 is 2′-OMe, n⁵ is 3, B1′ is 2′-OMe or 2′-F, q¹ is 9, T1′ is 2′-F, q² is 1, B2′ is 2′-OMe or 2′-F, q³ is 4, q⁴ is 0, B3′ is 2′-OMe or 2′-F, q⁵ is 7, T3′ is 2′-F, q⁶ is 1, B4′ is 2′-OMe, and q⁷ is 1; with two phosphorothioate internucleotide linkage modifications within position 1-5 of the sense strand (counting from the 5′-end), and two phosphorothioate internucleotide linkage modifications at positions 1 and 2 and two phosphorothioate internucleotide linkage modifications within positions 18-23 of the antisense strand (counting from the 5′-end). The RNAi agent also comprises a 5′-PS₂.

[0375] In one embodiment, B1 is 2′-OMe or 2′-F, n¹ is 8, T1 is 2′F, n² is 3, B2 is 2′-OMe, n³ is 7, n⁴ is 0, B3 is 2′-OMe, n⁵ is 3, B1′ is 2′-OMe or 2′-F, q¹ is 9, T1′ is 2′-F, q² is 1, B2′ is 2′-OMe or 2′-F, q³ is 4, q⁴ is 0, B3′ is 2′-OMe or 2′-F, q⁵ is 7, T3′ is 2′-F, q⁶ is 1, B4′ is 2′-OMe, and q⁷ is 1; with two phosphorothioate internucleotide linkage modifications within position 1-5 of the sense strand (counting from the 5′-end), and two phosphorothioate internucleotide linkage modifications at positions 1 and 2 and two phosphorothioate internucleotide linkage modifications within positions 18-23 of the antisense strand (counting from the 5′-end). The RNAi agent also comprises a 5′-deoxy-5′-C-malonyl.

[0376] In one embodiment, B1 is 2′-OMe or 2′-F, n¹ is 8, T1 is 2′F, n² is 3, B2 is 2′-OMe, n³ is 7, n⁴ is 0, B3 is 2′OMe, n⁵ is 3, B1′ is 2′-OMe or 2′-F, q¹ is 9, T1′ is 2′-F, q² is 1, B2′ is 2′-OMe or 2′-F, q³ is 4, T2′ is 2′-F, q⁴ is 2, B3′ is 2′-OMe or 2′-F, q⁵ is 5, T3′ is 2′-F, q⁶ is 1, B4′ is 2′-F, and q⁷ is 1. The RNAi agent also comprises a 5′-P.

[0377] In one embodiment, B1 is 2′-OMe or 2′-F, n¹ is 8, T1 is 2′F, n² is 3, B2 is 2′-OMe, n³ is 7, n⁴ is 0, B3 is 2′OMe, n⁵ is 3, B1′ is 2′-OMe or 2′-F, q¹ is 9, T1′ is 2′-F, q² is 1, B2′ is 2′-OMe or 2′-F, q³ is 4, T2′ is 2′-F, q⁴ is 2, B3′ is 2′-OMe or 2′-F, q⁵ is 5, T3′ is 2′-F, q⁶ is 1, B4′ is 2′-F, and q⁷ is 1. The RNAi agent also comprises a 5′-PS.

[0378] In one embodiment, B1 is 2′-OMe or 2′-F, n¹ is 8, T1 is 2′F, n² is 3, B2 is 2′-OMe, n³ is 7, n⁴ is 0, B3 is 2′OMe, n⁵ is 3, B1′ is 2′-OMe or 2′-F, q¹ is 9, T1′ is 2′-F, q² is 1, B2′ is 2′-OMe or 2′-F, q³ is 4, T2′ is 2′-F, q⁴ is 2, B3′ is 2′-OMe or 2′-F, q⁵ is 5, T3′ is 2′-F, q⁶ is 1, B4′ is 2′-F, and q⁷ is 1. The RNAi agent also comprises a 5′-VP. The 5′-VP may be 5′-E-VP, 5′-Z-VP, or combination thereof.

[0379] In one embodiment, B1 is 2′-OMe or 2′-F, n¹ is 8, T1 is 2′F, n² is 3, B2 is 2′-OMe, n³ is 7, n⁴ is 0, B3 is 2′OMe, n⁵ is 3, B1′ is 2′-OMe or 2′-F, q¹ is 9, T1′ is 2′-F, q² is 1, B2′ is 2′-OMe or 2′-F, q³ is 4, T2′ is 2′-F, q⁴ is 2, B3′ is 2′-OMe or 2′-F, q⁵ is 5, T3′ is 2′-F, q⁶ is 1, B4′ is 2′-F, and q⁷ is 1. The dsRNAi RNA agent also comprises a 5′-PS₂.

[0380] In one embodiment, B1 is 2′-OMe or 2′-F, n¹ is 8, T1 is 2′F, n² is 3, B2 is 2′-OMe, n³ is 7, n⁴ is 0, B3 is 2′OMe, n⁵ is 3, B1′ is 2′-OMe or 2′-F, q¹ is 9, T1′ is 2′-F, q² is 1, B2′ is 2′-OMe or 2′-F, q³ is 4, T2′ is 2′-F, q⁴ is 2, B3′ is 2′-OMe or 2′-F, q⁵ is 5, T3′ is 2′-F, q⁶ is 1, B4′ is 2′-F, and q⁷ is 1. The RNAi agent also comprises a 5′-deoxy-5′-C-malonyl.

[0381] In one embodiment, B1 is 2′-OMe or 2′-F, n¹ is 8, T1 is 2′F, n² is 3, B2 is 2′-OMe, n³ is 7, n⁴ is 0, B3 is 2′-OMe, n⁵ is 3, B1′ is 2′-OMe or 2′-F, q¹ is 9, T1′ is 2′-F, q² is 1, B2′ is 2′-OMe or 2′-F, q³ is 4, T2′ is 2′-F, q⁴ is 2, B3′ is 2′-OMe or 2′-F, q⁵ is 5, T3′ is 2′-F, q⁶ is 1, B4′ is 2′-F, and q⁷ is 1; with two phosphorothioate internucleotide linkage modifications within position 1-5 of the sense strand (counting from the 5′-end of the sense strand), and two phosphorothioate internucleotide linkage modifications at positions 1 and 2 and two phosphorothioate internucleotide linkage modifications within positions 18-23 of the antisense strand (counting from the 5′-end of the antisense strand). The RNAi agent also comprises a 5′-P.

[0382] In one embodiment, B1 is 2′-OMe or 2′-F, n¹ is 8, T1 is 2′F, n² is 3, B2 is 2′-OMe, n³ is 7, n⁴ is 0, B3 is 2′-OMe, n⁵ is 3, B1′ is 2′-OMe or 2′-F, q¹ is 9, T1′ is 2′-F, q² is 1, B2′ is 2′-OMe or 2′-F, q³ is 4, T2′ is 2′-F, q⁴ is 2, B3′ is 2′-OMe or 2′-F, q⁵ is 5, T3′ is 2′-F, q⁶ is 1, B4′ is 2′-F, and q⁷ is 1; with two phosphorothioate internucleotide linkage modifications within position 1-5 of the sense strand (counting from the 5′-end of the sense strand), and two phosphorothioate internucleotide linkage modifications at positions 1 and 2 and two phosphorothioate internucleotide linkage modifications within positions 18-23 of the antisense strand (counting from the 5′-end of the antisense strand). The RNAi agent also comprises a 5′-PS.

[0383] In one embodiment, B1 is 2′-OMe or 2′-F, n¹ is 8, T1 is 2′F, n² is 3, B2 is 2′-OMe, n³ is 7, n⁴ is 0, B3 is 2′-OMe, n⁵ is 3, B1′ is 2′-OMe or 2′-F, q¹ is 9, T1′ is 2′-F, q² is 1, B2′ is 2′-OMe or 2′-F, q³ is 4, T2′ is 2′-F, q⁴ is 2, B3′ is 2′-OMe or 2′-F, q⁵ is 5, T3′ is 2′-F, q⁶ is 1, B4′ is 2′-F, and q⁷ is 1; with two phosphorothioate internucleotide linkage modifications within position 1-5 of the sense strand (counting from the 5′-end of the sense strand), and two phosphorothioate internucleotide linkage modifications at positions 1 and 2 and two phosphorothioate internucleotide linkage modifications within positions 18-23 of the antisense strand (counting from the 5′-end of the antisense strand). The RNAi agent also comprises a 5′-VP. The 5′-VP may be 5′-E-VP, 5′-Z-VP, or combination thereof.

[0384] In one embodiment, B1 is 2′-OMe or 2′-F, n¹ is 8, T1 is 2′F, n² is 3, B2 is 2′-OMe, n³ is 7, n⁴ is 0, B3 is 2′-OMe, n⁵ is 3, B1′ is 2′-OMe or 2′-F, q¹ is 9, T1′ is 2′-F, q² is 1, B2′ is 2′-OMe or 2′-F, q³ is 4, T2′ is 2′-F, q⁴ is 2, B3′ is 2′-OMe or 2′-F, q⁵ is 5, T3′ is 2′-F, q⁶ is 1, B4′ is 2′-F, and q⁷ is 1; with two phosphorothioate internucleotide linkage modifications within position 1-5 of the sense strand (counting from the 5′-end of the sense strand), and two phosphorothioate internucleotide linkage modifications at positions 1 and 2 and two phosphorothioate internucleotide linkage modifications within positions 18-23 of the antisense strand (counting from the 5′-end of the antisense strand). The RNAi agent also comprises a 5′-PS₂.

[0385] In one embodiment, B1 is 2′-OMe or 2′-F, n¹ is 8, T1 is 2′F, n² is 3, B2 is 2′-OMe, n³ is 7, n⁴ is 0, B3 is 2′-OMe, n⁵ is 3, B1′ is 2′-OMe or 2′-F, q¹ is 9, T1′ is 2′-F, q² is 1, B2′ is 2′-OMe or 2′-F, q³ is 4, T2′ is 2′-F, q⁴ is 2, B3′ is 2′-OMe or 2′-F, q⁵ is 5, T3′ is 2′-F, q⁶ is 1, B4′ is 2′-F, and q⁷ is 1; with two phosphorothioate internucleotide linkage modifications within position 1-5 of the sense strand (counting from the 5′-end of the sense strand), and two phosphorothioate internucleotide linkage modifications at positions 1 and 2 and two phosphorothioate internucleotide linkage modifications within positions 18-23 of the antisense strand (counting from the 5′-end of the antisense strand). The RNAi agent also comprises a 5′-deoxy-5′-C-malonyl.

[0386] In one embodiment, B1 is 2′-OMe or 2′-F, n¹ is 8, T1 is 2′F, n² is 3, B2 is 2′-OMe, n³ is 7, n⁴ is 0, B3 is 2′-OMe, n⁵ is 3, B1′ is 2′-OMe or 2′-F, q¹ is 9, T1′ is 2′-F, q² is 1, B2′ is 2′-OMe or 2′-F, q³ is 4, q⁴ is 0, B3′ is 2′-OMe or 2′-F, q⁵ is 7, T3′ is 2′-F, q⁶ is 1, B4′ is 2′-F, and q⁷ is 1. The RNAi agent also comprises a 5′-P.

[0387] In one embodiment, B1 is 2′-OMe or 2′-F, n¹ is 8, T1 is 2′F, n² is 3, B2 is 2′-OMe, n³ is 7, n⁴ is 0, B3 is 2′-OMe, n⁵ is 3, B1′ is 2′-OMe or 2′-F, q¹ is 9, T1′ is 2′-F, q² is 1, B2′ is 2′-OMe or 2′-F, q³ is 4, q⁴ is 0, B3′ is 2′-OMe or 2′-F, q⁵ is 7, T3′ is 2′-F, q⁶ is 1, B4′ is 2′-F, and q⁷ is 1. The RNAi agent also comprises a 5′-PS.

[0388] In one embodiment, B1 is 2′-OMe or 2′-F, n¹ is 8, T1 is 2′F, n² is 3, B2 is 2′-OMe, n³ is 7, n⁴ is 0, B3 is 2′-OMe, n⁵ is 3, B1′ is 2′-OMe or 2′-F, q¹ is 9, T1′ is 2′-F, q² is 1, B2′ is 2′-OMe or 2′-F, q³ is 4, q⁴ is 0, B3′ is 2′-OMe or 2′-F, q⁵ is 7, T3′ is 2′-F, q⁶ is 1, B4′ is 2′-F, and q⁷ is 1. The RNAi agent also comprises a 5′-VP. The 5′-VP may be 5′-E-VP, 5′-Z-VP, or combination thereof.

[0389] In one embodiment, B1 is 2′-OMe or 2′-F, n¹ is 8, T1 is 2′F, n² is 3, B2 is 2′-OMe, n³ is 7, n⁴ is 0, B3 is 2′-OMe, n⁵ is 3, B1′ is 2′-OMe or 2′-F, q¹ is 9, T1′ is 2′-F, q² is 1, B2′ is 2′-OMe or 2′-F, q³ is 4, q⁴ is 0, B3′ is 2′-OMe or 2′-F, q⁵ is 7, T3′ is 2′-F, q⁶ is 1, B4′ is 2′-F, and q⁷ is 1. The RNAi agent also comprises a 5′-PS₂.

[0390] In one embodiment, B1 is 2′-OMe or 2′-F, n¹ is 8, T1 is 2′F, n² is 3, B2 is 2′-OMe, n³ is 7, n⁴ is 0, B3 is 2′-OMe, n⁵ is 3, B1′ is 2′-OMe or 2′-F, q¹ is 9, T1′ is 2′-F, q² is 1, B2′ is 2′-OMe or 2′-F, q³ is 4, q⁴ is 0, B3′ is 2′-OMe or 2′-F, q⁵ is 7, T3′ is 2′-F, q⁶ is 1, B4′ is 2′-F, and q⁷ is 1. The RNAi agent also comprises a 5′-deoxy-5′-C-malonyl.

[0391] In one embodiment, B1 is 2′-OMe or 2′-F, n¹ is 8, T1 is 2′F, n² is 3, B2 is 2′-OMe, n³ is 7, n⁴ is 0, B3 is 2′-OMe, n⁵ is 3, B1′ is 2′-OMe or 2′-F, q¹ is 9, T1′ is 2′-F, q² is 1, B2′ is 2′-OMe or 2′-F, q³ is 4, q⁴ is 0, B3′ is 2′-OMe or 2′-F, q⁵ is 7, T3′ is 2′-F, q⁶ is 1, B4′ is 2′-F, and q⁷ is 1; with two phosphorothioate internucleotide linkage modifications within position 1-5 of the sense strand (counting from the 5′-end of the sense strand), and two phosphorothioate internucleotide linkage modifications at positions 1 and 2 and two phosphorothioate internucleotide linkage modifications within positions 18-23 of the antisense strand (counting from the 5′-end of the antisense strand). The RNAi agent also comprises a 5′-P.

[0392] In one embodiment, B1 is 2′-OMe or 2′-F, n¹ is 8, T1 is 2′F, n² is 3, B2 is 2′-OMe, n³ is 7, n⁴ is 0, B3 is 2′-OMe, n⁵ is 3, B1′ is 2′-OMe or 2′-F, q¹ is 9, T1′ is 2′-F, q² is 1, B2′ is 2′-OMe or 2′-F, q³ is 4, q⁴ is 0, B3′ is 2′-OMe or 2′-F, q⁵ is 7, T3′ is 2′-F, q⁶ is 1, B4′ is 2′-F, and q⁷ is 1; with two phosphorothioate internucleotide linkage modifications within position 1-5 of the sense strand (counting from the 5′-end of the sense strand), and two phosphorothioate internucleotide linkage modifications at positions 1 and 2 and two phosphorothioate internucleotide linkage modifications within positions 18-23 of the antisense strand (counting from the 5′-end of the antisense strand). The RNAi agent also comprises a 5′-PS.

[0393] In one embodiment, B1 is 2′-OMe or 2′-F, n¹ is 8, T1 is 2′F, n² is 3, B2 is 2′-OMe, n³ is 7, n⁴ is 0, B3 is 2′-OMe, n⁵ is 3, B1′ is 2′-OMe or 2′-F, q¹ is 9, T1′ is 2′-F, q² is 1, B2′ is 2′-OMe or 2′-F, q³ is 4, q⁴ is 0, B3′ is 2′-OMe or 2′-F, q⁵ is 7, T3′ is 2′-F, q⁶ is 1, B4′ is 2′-F, and q⁷ is 1; with two phosphorothioate internucleotide linkage modifications within position 1-5 of the sense strand (counting from the 5′-end of the sense strand), and two phosphorothioate internucleotide linkage modifications at positions 1 and 2 and two phosphorothioate internucleotide linkage modifications within positions 18-23 of the antisense strand (counting from the 5′-end of the antisense strand). The RNAi agent also comprises a 5′-VP. The 5′-VP may be 5′-E-VP, 5′-Z-VP, or combination thereof.

[0394] In one embodiment, B1 is 2′-OMe or 2′-F, n¹ is 8, T1 is 2′F, n² is 3, B2 is 2′-OMe, n³ is 7, n⁴ is 0, B3 is 2′-OMe, n⁵ is 3, B1′ is 2′-OMe or 2′-F, q¹ is 9, T1′ is 2′-F, q² is 1, B2′ is 2′-OMe or 2′-F, q³ is 4, q⁴ is 0, B3′ is 2′-OMe or 2′-F, q⁵ is 7, T3′ is 2′-F, q⁶ is 1, B4′ is 2′-F, and q⁷ is 1; with two phosphorothioate internucleotide linkage modifications within position 1-5 of the sense strand (counting from the 5′-end of the sense strand), and two phosphorothioate internucleotide linkage modifications at positions 1 and 2 and two phosphorothioate internucleotide linkage modifications within positions 18-23 of the antisense strand (counting from the 5′-end of the antisense strand). The RNAi agent also comprises a 5′-PS₂.

[0395] In one embodiment, B1 is 2′-OMe or 2′-F, n¹ is 8, T1 is 2′F, n² is 3, B2 is 2′-OMe, n³ is 7, n⁴ is 0, B3 is 2′-OMe, n⁵ is 3, B1′ is 2′-OMe or 2′-F, q¹ is 9, T1′ is 2′-F, q² is 1, B2′ is 2′-OMe or 2′-F, q³ is 4, q⁴ is 0, B3′ is 2′-OMe or 2′-F, q⁵ is 7, T3′ is 2′-F, q⁶ is 1, B4′ is 2′-F, and q⁷ is 1; with two phosphorothioate internucleotide linkage modifications within position 1-5 of the sense strand (counting from the 5′-end of the sense strand), and two phosphorothioate internucleotide linkage modifications at positions 1 and 2 and two phosphorothioate internucleotide linkage modifications within positions 18-23 of the antisense strand (counting from the 5′-end of the antisense strand). The RNAi agent also comprises a 5′-deoxy-5′-C-malonyl.

[0396] In one embodiment, B1 is 2′-OMe or 2′-F, n¹ is 8, T1 is 2′F, n² is 3, B2 is 2′-OMe, n³ is 7, n⁴ is 0, B3 is 2′-OMe, n⁵ is 3, B1′ is 2′-OMe or 2′-F, q¹ is 9, T1′ is 2′-F, q² is 1, B2′ is 2′-OMe or 2′-F, q³ is 4, T2′ is 2′-F, q⁴ is 2, B3′ is 2′-OMe or 2′-F, q⁵ is 5, T3′ is 2′-F, q⁶ is 1, B4′ is 2′-OMe, and q⁷ is 1; with two phosphorothioate internucleotide linkage modifications within position 1-5 of the sense strand (counting from the 5′-end of the sense strand), and two phosphorothioate internucleotide linkage modifications at positions 1 and 2 and two phosphorothioate internucleotide linkage modifications within positions 18-23 of the antisense strand (counting from the 5′-end of the antisense strand). The RNAi agent also comprises a 5′-P and a targeting ligand. In one embodiment, the 5′-P is at the 5′-end of the antisense strand, and the targeting ligand is at the 3′-end of the sense strand.

[0397] In one embodiment, B1 is 2′-OMe or 2′-F, n¹ is 8, T1 is 2′F, n² is 3, B2 is 2′-OMe, n³ is 7, n⁴ is 0, B3 is 2′-OMe, n⁵ is 3, B1′ is 2′-OMe or 2′-F, q¹ is 9, T1′ is 2′-F, q² is 1, B2′ is 2′-OMe or 2′-F, q³ is 4, T2′ is 2′-F, q⁴ is 2, B3′ is 2′-OMe or 2′-F, q⁵ is 5, T3′ is 2′-F, q⁶ is 1, B4′ is 2′-OMe, and q⁷ is 1; with two phosphorothioate internucleotide linkage modifications within position 1-5 of the sense strand (counting from the 5′-end of the sense strand), and two phosphorothioate internucleotide linkage modifications at positions 1 and 2 and two phosphorothioate internucleotide linkage modifications within positions 18-23 of the antisense strand (counting from the 5′-end of the antisense strand). The RNAi agent also comprises a 5′-PS and a targeting ligand. In one embodiment, the 5′-PS is at the 5′-end of the antisense strand, and the targeting ligand is at the 3′-end of the sense strand.

[0398] In one embodiment, B1 is 2′-OMe or 2′-F, n¹ is 8, T1 is 2′F, n² is 3, B2 is 2′-OMe, n³ is 7, n⁴ is 0, B3 is 2′-OMe, n⁵ is 3, B1′ is 2′-OMe or 2′-F, q¹ is 9, T1′ is 2′-F, q² is 1, B2′ is 2′-OMe or 2′-F, q³ is 4, T2′ is 2′-F, q⁴ is 2, B3′ is 2′-OMe or 2′-F, q⁵ is 5, T3′ is 2′-F, q⁶ is 1, B4′ is 2′-OMe, and q⁷ is 1; with two phosphorothioate internucleotide linkage modifications within position 1-5 of the sense strand (counting from the 5′-end of the sense strand), and two phosphorothioate internucleotide linkage modifications at positions 1 and 2 and two phosphorothioate internucleotide linkage modifications within positions 18-23 of the antisense strand (counting from the 5′-end of the antisense strand). The RNAi agent also comprises a 5′-VP (e.g., a 5′-E-VP, 5′-Z-VP, or combination thereof), and a targeting ligand.

[0399] In one embodiment, the 5′-VP is at the 5′-end of the antisense strand, and the targeting ligand is at the 3′-end of the sense strand.

[0400] In one embodiment, B1 is 2′-OMe or 2′-F, n¹ is 8, T1 is 2′F, n² is 3, B2 is 2′-OMe, n³ is 7, n⁴ is 0, B3 is 2′-OMe, n⁵ is 3, B1′ is 2′-OMe or 2′-F, q¹ is 9, T1′ is 2′-F, q² is 1, B2′ is 2′-OMe or 2′-F, q³ is 4, T2′ is 2′-F, q⁴ is 2, B3′ is 2′-OMe or 2′-F, q⁵ is 5, T3′ is 2′-F, q⁶ is 1, B4′ is 2′-OMe, and q⁷ is 1; with two phosphorothioate internucleotide linkage modifications within position 1-5 of the sense strand (counting from the 5′-end of the sense strand), and two phosphorothioate internucleotide linkage modifications at positions 1 and 2 and two phosphorothioate internucleotide linkage modifications within positions 18-23 of the antisense strand (counting from the 5′-end of the antisense strand). The RNAi agent also comprises a 5′-PS₂ and a targeting ligand. In one embodiment, the 5′-PS₂ is at the 5′-end of the antisense strand, and the targeting ligand is at the 3′-end of the sense strand.

[0401] In one embodiment, B1 is 2′-OMe or 2′-F, n¹ is 8, T1 is 2′F, n² is 3, B2 is 2′-OMe, n³ is 7, n⁴ is 0, B3 is 2′-OMe, n⁵ is 3, B1′ is 2′-OMe or 2′-F, q¹ is 9, T1′ is 2′-F, q² is 1, B2′ is 2′-OMe or 2′-F, q³ is 4, T2′ is 2′-F, q⁴ is 2, B3′ is 2′-OMe or 2′-F, q⁵ is 5, T3′ is 2′-F, q⁶ is 1, B4′ is 2′-OMe, and q⁷ is 1; with two phosphorothioate internucleotide linkage modifications within position 1-5 of the sense strand (counting from the 5′-end of the sense strand), and two phosphorothioate internucleotide linkage modifications at positions 1 and 2 and two phosphorothioate internucleotide linkage modifications within positions 18-23 of the antisense strand (counting from the 5′-end of the antisense strand). The RNAi agent also comprises a 5′-deoxy-5′-C-malonyl and a targeting ligand. In one embodiment, the 5′-deoxy-5′-C-malonyl is at the 5′-end of the antisense strand, and the targeting ligand is at the 3′-end of the sense strand.

[0402] In one embodiment, B1 is 2′-OMe or 2′-F, n¹ is 8, T1 is 2′F, n² is 3, B2 is 2′-OMe, n³ is 7, n⁴ is 0, B3 is 2′-OMe, n⁵ is 3, B1′ is 2′-OMe or 2′-F, q¹ is 9, T1′ is 2′-F, q² is 1, B2′ is 2′-OMe or 2′-F, q³ is 4, q⁴ is 0, B3′ is 2′-OMe or 2′-F, q⁵ is 7, T3′ is 2′-F, q⁶ is 1, B4′ is 2′-OMe, and q⁷ is 1; with two phosphorothioate internucleotide linkage modifications within position 1-5 of the sense strand (counting from the 5′-end), and two phosphorothioate internucleotide linkage modifications at positions 1 and 2 and two phosphorothioate internucleotide linkage modifications within positions 18-23 of the antisense strand (counting from the 5′-end). The RNAi agent also comprises a 5′-P and a targeting ligand. In one embodiment, the 5′-P is at the 5′-end of the antisense strand, and the targeting ligand is at the 3′-end of the sense strand.

[0403] In one embodiment, B1 is 2′-OMe or 2′-F, n¹ is 8, T1 is 2′F, n² is 3, B2 is 2′-OMe, n³ is 7, n⁴ is 0, B3 is 2′-OMe, n⁵ is 3, B1′ is 2′-OMe or 2′-F, q¹ is 9, T1′ is 2′-F, q² is 1, B2′ is 2′-OMe or 2′-F, q³ is 4, q⁴ is 0, B3′ is 2′-OMe or 2′-F, q⁵ is 7, T3′ is 2′-F, q⁶ is 1, B4′ is 2′-OMe, and q⁷ is 1; with two phosphorothioate internucleotide linkage modifications within position 1-5 of the sense strand (counting from the 5′-end), and two phosphorothioate internucleotide linkage modifications at positions 1 and 2 and two phosphorothioate internucleotide linkage modifications within positions 18-23 of the antisense strand (counting from the 5′-end). The RNAi agent also comprises a 5′-PS and a targeting ligand. In one embodiment, the 5′-PS is at the 5′-end of the antisense strand, and the targeting ligand is at the 3′-end of the sense strand.

[0404] In one embodiment, B1 is 2′-OMe or 2′-F, n¹ is 8, T1 is 2′F, n² is 3, B2 is 2′-OMe, n³ is 7, n⁴ is 0, B3 is 2′-OMe, n⁵ is 3, B1′ is 2′-OMe or 2′-F, q¹ is 9, T1′ is 2′-F, q² is 1, B2′ is 2′-OMe or 2′-F, q³ is 4, q⁴ is 0, B3′ is 2′-OMe or 2′-F, q⁵ is 7, T3′ is 2′-F, q⁶ is 1, B4′ is 2′-OMe, and q⁷ is 1; with two phosphorothioate internucleotide linkage modifications within position 1-5 of the sense strand (counting from the 5′-end), and two phosphorothioate internucleotide linkage modifications at positions 1 and 2 and two phosphorothioate internucleotide linkage modifications within positions 18-23 of the antisense strand (counting from the 5′-end). The RNAi agent also comprises a 5′-VP (e.g., a 5′-E-VP, 5′-Z-VP, or combination thereof) and a targeting ligand. In one embodiment, the 5′-VP is at the 5′-end of the antisense strand, and the targeting ligand is at the 3′-end of the sense strand.

[0405] In one embodiment, B1 is 2′-OMe or 2′-F, n¹ is 8, T1 is 2′F, n² is 3, B2 is 2′-OMe, n³ is 7, n⁴ is 0, B3 is 2′-OMe, n⁵ is 3, B1′ is 2′-OMe or 2′-F, q¹ is 9, T1′ is 2′-F, q² is 1, B2′ is 2′-OMe or 2′-F, q³ is 4, q⁴ is 0, B3′ is 2′-OMe or 2′-F, q⁵ is 7, T3′ is 2′-F, q⁶ is 1, B4′ is 2′-OMe, and q⁷ is 1; with two phosphorothioate internucleotide linkage modifications within position 1-5 of the sense strand (counting from the 5′-end), and two phosphorothioate internucleotide linkage modifications at positions 1 and 2 and two phosphorothioate internucleotide linkage modifications within positions 18-23 of the antisense strand (counting from the 5′-end). The RNAi agent also comprises a 5′-PS₂ and a targeting ligand. In one embodiment, the 5′-PS₂ is at the 5′-end of the antisense strand, and the targeting ligand is at the 3′-end of the sense strand.

[0406] In one embodiment, B1 is 2′-OMe or 2′-F, n¹ is 8, T1 is 2′F, n² is 3, B2 is 2′-OMe, n³ is 7, n⁴ is 0, B3 is 2′-OMe, n⁵ is 3, B1′ is 2′-OMe or 2′-F, q¹ is 9, T1′ is 2′-F, q² is 1, B2′ is 2′-OMe or 2′-F, q³ is 4, q⁴ is 0, B3′ is 2′-OMe or 2′-F, q⁵ is 7, T3′ is 2′-F, q⁶ is 1, B4′ is 2′-OMe, and q⁷ is 1; with two phosphorothioate internucleotide linkage modifications within position 1-5 of the sense strand (counting from the 5′-end), and two phosphorothioate internucleotide linkage modifications at positions 1 and 2 and two phosphorothioate internucleotide linkage modifications within positions 18-23 of the antisense strand (counting from the 5′-end). The RNAi agent also comprises a 5′-deoxy-5′-C-malonyl and a targeting ligand. In one embodiment, the 5′-deoxy-5′-C-malonyl is at the 5′-end of the antisense strand, and the targeting ligand is at the 3′-end of the sense strand.

[0407] In one embodiment, B1 is 2′-OMe or 2′-F, n¹ is 8, T1 is 2′F, n² is 3, B2 is 2′-OMe, n³ is 7, n⁴ is 0, B3 is 2′-OMe, n⁵ is 3, B1′ is 2′-OMe or 2′-F, q¹ is 9, T1′ is 2′-F, q² is 1, B2′ is 2′-OMe or 2′-F, q³ is 4, T2′ is 2′-F, q⁴ is 2, B3′ is 2′-OMe or 2′-F, q⁵ is 5, T3′ is 2′-F, q⁶ is 1, B4′ is 2′-F, and q⁷ is 1; with two phosphorothioate internucleotide linkage modifications within position 1-5 of the sense strand (counting from the 5′-end of the sense strand), and two phosphorothioate internucleotide linkage modifications at positions 1 and 2 and two phosphorothioate internucleotide linkage modifications within positions 18-23 of the antisense strand (counting from the 5′-end of the antisense strand). The RNAi agent also comprises a 5′-P and a targeting ligand. In one embodiment, the 5′-P is at the 5′-end of the antisense strand, and the targeting ligand is at the 3′-end of the sense strand.

[0408] In one embodiment, B1 is 2′-OMe or 2′-F, n¹ is 8, T1 is 2′F, n² is 3, B2 is 2′-OMe, n³ is 7, n⁴ is 0, B3 is 2′-OMe, n⁵ is 3, B1′ is 2′-OMe or 2′-F, q¹ is 9, T1′ is 2′-F, q² is 1, B2′ is 2′-OMe or 2′-F, q³ is 4, T2′ is 2′-F, q⁴ is 2, B3′ is 2′-OMe or 2′-F, q⁵ is 5, T3′ is 2′-F, q⁶ is 1, B4′ is 2′-F, and q⁷ is 1; with two phosphorothioate internucleotide linkage modifications within position 1-5 of the sense strand (counting from the 5′-end of the sense strand), and two phosphorothioate internucleotide linkage modifications at positions 1 and 2 and two phosphorothioate internucleotide linkage modifications within positions 18-23 of the antisense strand (counting from the 5′-end of the antisense strand). The RNAi agent also comprises a 5′-PS and a targeting ligand. In one embodiment, the 5′-PS is at the 5′-end of the antisense strand, and the targeting ligand is at the 3′-end of the sense strand.

[0409] In one embodiment, B1 is 2′-OMe or 2′-F, n¹ is 8, T1 is 2′F, n² is 3, B2 is 2′-OMe, n³ is 7, n⁴ is 0, B3 is 2′-OMe, n⁵ is 3, B1′ is 2′-OMe or 2′-F, q¹ is 9, T1′ is 2′-F, q² is 1, B2′ is 2′-OMe or 2′-F, q³ is 4, T2′ is 2′-F, q⁴ is 2, B3′ is 2′-OMe or 2′-F, q⁵ is 5, T3′ is 2′-F, q⁶ is 1, B4′ is 2′-F, and q⁷ is 1; with two phosphorothioate internucleotide linkage modifications within position 1-5 of the sense strand (counting from the 5′-end of the sense strand), and two phosphorothioate internucleotide linkage modifications at positions 1 and 2 and two phosphorothioate internucleotide linkage modifications within positions 18-23 of the antisense strand (counting from the 5′-end of the antisense strand). The RNAi agent also comprises a 5′-VP (e.g., a 5′-E-VP, 5′-Z-VP, or combination thereof) and a targeting ligand. In one embodiment, the 5′-VP is at the 5′-end of the antisense strand, and the targeting ligand is at the 3′-end of the sense strand.

[0410] In one embodiment, B1 is 2′-OMe or 2′-F, n¹ is 8, T1 is 2′F, n² is 3, B2 is 2′-OMe, n³ is 7, n⁴ is 0, B3 is 2′-OMe, n⁵ is 3, B1′ is 2′-OMe or 2′-F, q¹ is 9, T1′ is 2′-F, q² is 1, B2′ is 2′-OMe or 2′-F, q³ is 4, T2′ is 2′-F, q⁴ is 2, B3′ is 2′-OMe or 2′-F, q⁵ is 5, T3′ is 2′-F, q⁶ is 1, B4′ is 2′-F, and q⁷ is 1; with two phosphorothioate internucleotide linkage modifications within position 1-5 of the sense strand (counting from the 5′-end of the sense strand), and two phosphorothioate internucleotide linkage modifications at positions 1 and 2 and two phosphorothioate internucleotide linkage modifications within positions 18-23 of the antisense strand (counting from the 5′-end of the antisense strand). The RNAi agent also comprises a 5′-PS₂ and a targeting ligand. In one embodiment, the 5′-PS₂ is at the 5′-end of the antisense strand, and the targeting ligand is at the 3′-end of the sense strand.

[0411] In one embodiment, B1 is 2′-OMe or 2′-F, n¹ is 8, T1 is 2′F, n² is 3, B2 is 2′-OMe, n³ is 7, n⁴ is 0, B3 is 2′-OMe, n⁵ is 3, B1′ is 2′-OMe or 2′-F, q¹ is 9, T1′ is 2′-F, q² is 1, B2′ is 2′-OMe or 2′-F, q³ is 4, T2′ is 2′-F, q⁴ is 2, B3′ is 2′-OMe or 2′-F, q⁵ is 5, T3′ is 2′-F, q⁶ is 1, B4′ is 2′-F, and q⁷ is 1; with two phosphorothioate internucleotide linkage modifications within position 1-5 of the sense strand (counting from the 5′-end of the sense strand), and two phosphorothioate internucleotide linkage modifications at positions 1 and 2 and two phosphorothioate internucleotide linkage modifications within positions 18-23 of the antisense strand (counting from the 5′-end of the antisense strand). The RNAi agent also comprises a 5′-deoxy-5′-C-malonyl and a targeting ligand. In one embodiment, the 5′-deoxy-5′-C-malonyl is at the 5′-end of the antisense strand, and the targeting ligand is at the 3′-end of the sense strand.

[0412] In one embodiment, B1 is 2′-OMe or 2′-F, n¹ is 8, T1 is 2′F, n² is 3, B2 is 2′-OMe, n³ is 7, n⁴ is 0, B3 is 2′-OMe, n⁵ is 3, B1′ is 2′-OMe or 2′-F, q¹ is 9, T1′ is 2′-F, q² is 1, B2′ is 2′-OMe or 2′-F, q³ is 4, q⁴ is 0, B3′ is 2′-OMe or 2′-F, q⁵ is 7, T3′ is 2′-F, q⁶ is 1, B4′ is 2′-F, and q⁷ is 1; with two phosphorothioate internucleotide linkage modifications within position 1-5 of the sense strand (counting from the 5′-end of the sense strand), and two phosphorothioate internucleotide linkage modifications at positions 1 and 2 and two phosphorothioate internucleotide linkage modifications within positions 18-23 of the antisense strand (counting from the 5′-end of the antisense strand). The RNAi agent also comprises a 5′-P and a targeting ligand. In one embodiment, the 5′-P is at the 5′-end of the antisense strand, and the targeting ligand is at the 3′-end of the sense strand.

[0413] In one embodiment, B1 is 2′-OMe or 2′-F, n¹ is 8, T1 is 2′F, n² is 3, B2 is 2′-OMe, n³ is 7, n⁴ is 0, B3 is 2′-OMe, n⁵ is 3, B1′ is 2′-OMe or 2′-F, q¹ is 9, T1′ is 2′-F, q² is 1, B2′ is 2′-OMe or 2′-F, q³ is 4, q⁴ is 0, B3′ is 2′-OMe or 2′-F, q⁵ is 7, T3′ is 2′-F, q⁶ is 1, B4′ is 2′-F, and q⁷ is 1; with two phosphorothioate internucleotide linkage modifications within position 1-5 of the sense strand (counting from the 5′-end of the sense strand), and two phosphorothioate internucleotide linkage modifications at positions 1 and 2 and two phosphorothioate internucleotide linkage modifications within positions 18-23 of the antisense strand (counting from the 5′-end of the antisense strand). The RNAi agent also comprises a 5′-PS and a targeting ligand. In one embodiment, the 5′-PS is at the 5′-end of the antisense strand, and the targeting ligand is at the 3′-end of the sense strand.

[0414] In one embodiment, B1 is 2′-OMe or 2′-F, n¹ is 8, T1 is 2′F, n² is 3, B2 is 2′-OMe, n³ is 7, n⁴ is 0, B3 is 2′-OMe, n⁵ is 3, B1′ is 2′-OMe or 2′-F, q¹ is 9, T1′ is 2′-F, q² is 1, B2′ is 2′-OMe or 2′-F, q³ is 4, q⁴ is 0, B3′ is 2′-OMe or 2′-F, q⁵ is 7, T3′ is 2′-F, q⁶ is 1, B4′ is 2′-F, and q⁷ is 1; with two phosphorothioate internucleotide linkage modifications within position 1-5 of the sense strand (counting from the 5′-end of the sense strand), and two phosphorothioate internucleotide linkage modifications at positions 1 and 2 and two phosphorothioate internucleotide linkage modifications within positions 18-23 of the antisense strand (counting from the 5′-end of the antisense strand). The RNAi agent also comprises a 5′-VP (e.g., a 5′-E-VP, 5′-Z-VP, or combination thereof) and a targeting ligand. In one embodiment, the 5′-VP is at the 5′-end of the antisense strand, and the targeting ligand is at the 3′-end of the sense strand.

[0415] In one embodiment, B1 is 2′-OMe or 2′-F, n¹ is 8, T1 is 2′F, n² is 3, B2 is 2′-OMe, n³ is 7, n⁴ is 0, B3 is 2′-OMe, n⁵ is 3, B1′ is 2′-OMe or 2′-F, q¹ is 9, T1′ is 2′-F, q² is 1, B2′ is 2′-OMe or 2′-F, q³ is 4, q⁴ is 0, B3′ is 2′-OMe or 2′-F, q⁵ is 7, T3′ is 2′-F, q⁶ is 1, B4′ is 2′-F, and q⁷ is 1; with two phosphorothioate internucleotide linkage modifications within position 1-5 of the sense strand (counting from the 5′-end of the sense strand), and two phosphorothioate internucleotide linkage modifications at positions 1 and 2 and two phosphorothioate internucleotide linkage modifications within positions 18-23 of the antisense strand (counting from the 5′-end of the antisense strand). The RNAi agent also comprises a 5′-PS₂ and a targeting ligand. In one embodiment, the 5′-PS₂ is at the 5′-end of the antisense strand, and the targeting ligand is at the 3′-end of the sense strand.

[0416] In one embodiment, B1 is 2′-OMe or 2′-F, n¹ is 8, T1 is 2′F, n² is 3, B2 is 2′-OMe, n³ is 7, n⁴ is 0, B3 is 2′-OMe, n⁵ is 3, B1′ is 2′-OMe or 2′-F, q¹ is 9, T1′ is 2′-F, q² is 1, B2′ is 2′-OMe or 2′-F, q³ is 4, q⁴ is 0, B3′ is 2′-OMe or 2′-F, q⁵ is 7, T3′ is 2′-F, q⁶ is 1, B4′ is 2′-F, and q⁷ is 1; with two phosphorothioate internucleotide linkage modifications within position 1-5 of the sense strand (counting from the 5′-end of the sense strand), and two phosphorothioate internucleotide linkage modifications at positions 1 and 2 and two phosphorothioate internucleotide linkage modifications within positions 18-23 of the antisense strand (counting from the 5′-end of the antisense strand). The RNAi agent also comprises a 5′-deoxy-5′-C-malonyl and a targeting ligand. In one embodiment, the 5′-deoxy-5′-C-malonyl is at the 5′-end of the antisense strand, and the targeting ligand is at the 3′-end of the sense strand.

[0417] In a particular embodiment, an RNAi agent of the present invention comprises:
[0418] (a) a sense strand having:
   [0419] (i) a length of 21 nucleotides;
   [0420] (ii) an ASGPR ligand attached to the 3′-end, wherein said ASGPR ligand comprises three GalNAc derivatives attached through a trivalent branched linker; and
   [0421] (iii) 2′-F modifications at positions 1, 3, 5, 7, 9 to 11, 13, 17, 19, and 21, and 2′-OMe modifications at positions 2, 4, 6, 8, 12, 14 to 16, 18, and 20 (counting from the 5′ end);
[0422] and
[0423] (b) an antisense strand having:
   [0424] (i) a length of 23 nucleotides;
   [0425] (ii) 2′-OMe modifications at positions 1, 3, 5, 9, 11 to 13, 15, 17, 19, 21, and 23, and 2′F modifications at positions 2, 4, 6 to 8, 10, 14, 16, 18, 20, and 22 (counting from the 5′ end); and
   [0426] (iii) phosphorothioate internucleotide linkages between nucleotide positions 21 and 22, and between nucleotide positions 22 and 23 (counting from the 5′ end);
[0427] wherein the dsRNA agents have a two nucleotide overhang at the 3′-end of the antisense strand, and a blunt end at the 5′-end of the antisense strand.

[0428] In another particular embodiment, an RNAi agent of the present invention comprises:
[0429] (a) a sense strand having:
[0430] (i) a length of 21 nucleotides;
   [0431] (ii) an ASGPR ligand attached to the 3′-end, wherein said ASGPR ligand comprises three GalNAc derivatives attached through a trivalent branched linker;
   [0432] (iii) 2′-F modifications at positions 1, 3, 5, 7, 9 to 11, 13, 15, 17, 19, and 21, and 2′-OMe modifications at positions 2, 4, 6, 8, 12, 14, 16, 18, and 20 (counting from the 5′ end); and
   [0433] (iv) phosphorothioate internucleotide linkages between nucleotide positions 1 and 2, and between nucleotide positions 2 and 3 (counting from the 5′ end);
[0434] and
[0435] (b) an antisense strand having:
   [0436] (i) a length of 23 nucleotides;
[0437] (ii) 2′-OMe modifications at positions 1, 3, 5, 7, 9, 11 to 13, 15, 17, 19, and 21 to 23, and 2′F modifications at positions 2, 4, 6, 8, 10, 14, 16, 18, and 20 (counting from the 5′ end); and
[0438] (iii) phosphorothioate internucleotide linkages between nucleotide positions 1 and 2, between nucleotide positions 2 and 3, between nucleotide positions 21 and 22, and between nucleotide positions 22 and 23 (counting from the 5′ end);
   wherein the RNAi agents have a two nucleotide overhang at the 3′-end of the antisense strand, and a blunt end at the 5′-end of the antisense strand.

[0439] In another particular embodiment, a RNAi agent of the present invention comprises:
[0440] (a) a sense strand having:
   [0441] (i) a length of 21 nucleotides;
[0442] (ii) an ASGPR ligand attached to the 3′-end, wherein said ASGPR ligand comprises three GalNAc derivatives attached through a trivalent branched linker;
   [0443] (iii) 2′-OMe modifications at positions 1 to 6, 8, 10, and 12 to 21, 2′-F modifications at positions 7, and 9, and a deoxy-nucleotide (e.g. dT) at position 11 (counting from the 5′ end); and
   [0444] (iv) phosphorothioate internucleotide linkages between nucleotide positions 1 and 2, and between nucleotide positions 2 and 3 (counting from the 5′ end);
[0445] and
[0446] (b) an antisense strand having:
   [0447] (i) a length of 23 nucleotides;
[0448] (ii) 2′-OMe modifications at positions 1, 3, 7, 9, 11, 13, 15, 17, and 19 to 23, and 2′-F modifications at positions 2, 4 to 6, 8, 10, 12, 14, 16, and 18 (counting from the 5′ end);
   [0449] and
[0450] (iii) phosphorothioate internucleotide linkages between nucleotide positions 1 and 2, between nucleotide positions 2 and 3, between nucleotide positions 21 and 22, and between nucleotide positions 22 and 23 (counting from the 5′ end);
   wherein the RNAi agents have a two nucleotide overhang at the 3′-end of the antisense strand, and a blunt end at the 5′-end of the antisense strand.

[0451] In another particular embodiment, a RNAi agent of the present invention comprises:
[0452] (a) a sense strand having:
   [0453] (i) a length of 21 nucleotides;
[0454] (ii) an ASGPR ligand attached to the 3′-end, wherein said ASGPR ligand comprises three GalNAc derivatives attached through a trivalent branched linker;
   [0455] (iii) 2′-OMe modifications at positions 1 to 6, 8, 10, 12, 14, and 16 to 21, and 2′-F modifications at positions 7, 9, 11, 13, and 15; and
   [0456] (iv) phosphorothioate internucleotide linkages between nucleotide positions 1 and 2, and between nucleotide positions 2 and 3 (counting from the 5′ end);
[0457] and
[0458] (b) an antisense strand having:
   [0459] (i) a length of 23 nucleotides;
[0460] (ii) 2′-OMe modifications at positions 1, 5, 7, 9, 11, 13, 15, 17, 19, and 21 to 23, and 2′-F modifications at positions 2 to 4, 6, 8, 10, 12, 14, 16, 18, and 20 (counting from the 5′ end); and
[0461] (iii) phosphorothioate internucleotide linkages between nucleotide positions 1 and 2, between nucleotide positions 2 and 3, between nucleotide positions 21 and 22, and between nucleotide positions 22 and 23 (counting from the 5′ end);
   wherein the RNAi agents have a two nucleotide overhang at the 3′-end of the antisense strand, and a blunt end at the 5′-end of the antisense strand.

[0462] In another particular embodiment, a RNAi agent of the present invention comprises:
[0463] (a) a sense strand having:
   [0464] (i) a length of 21 nucleotides;
[0465] (ii) an ASGPR ligand attached to the 3′-end, wherein said ASGPR ligand comprises three GalNAc derivatives attached through a trivalent branched linker;
   [0466] (iii) 2′-OMe modifications at positions 1 to 9, and 12 to 21, and 2′-F modifications at positions 10, and 11; and
   [0467] (iv) phosphorothioate internucleotide linkages between nucleotide positions 1 and 2, and between nucleotide positions 2 and 3 (counting from the 5′ end);
[0468] and
[0469] (b) an antisense strand having:
   [0470] (i) a length of 23 nucleotides;
[0471] (ii) 2′-OMe modifications at positions 1, 3, 5, 7, 9, 11 to 13, 15, 17, 19, and 21 to 23, and 2′-F modifications at positions 2, 4, 6, 8, 10, 14, 16, 18, and 20 (counting from the 5′ end); and
[0472] (iii) phosphorothioate internucleotide linkages between nucleotide positions 1 and 2, between nucleotide positions 2 and 3, between nucleotide positions 21 and 22, and between nucleotide positions 22 and 23 (counting from the 5′ end);
   wherein the RNAi agents have a two nucleotide overhang at the 3′-end of the antisense strand, and a blunt end at the 5′-end of the antisense strand.

[0473] In another particular embodiment, a RNAi agent of the present invention comprises:
[0474] (a) a sense strand having:
   [0475] (i) a length of 21 nucleotides;
[0476] (ii) an ASGPR ligand attached to the 3′-end, wherein said ASGPR ligand comprises three GalNAc derivatives attached through a trivalent branched linker;
   [0477] (iii) 2′-F modifications at positions 1, 3, 5, 7, 9 to 11, and 13, and 2′-OMe modifications at positions 2, 4, 6, 8, 12, and 14 to 21; and
   [0478] (iv) phosphorothioate internucleotide linkages between nucleotide positions 1 and 2, and between nucleotide positions 2 and 3 (counting from the 5′ end);
[0479] and
[0480] (b) an antisense strand having:
   [0481] (i) a length of 23 nucleotides;
[0482] (ii) 2′-OMe modifications at positions 1, 3, 5 to 7, 9, 11 to 13, 15, 17 to 19, and 21 to 23, and 2′-F modifications at positions 2, 4, 8, 10, 14, 16, and 20 (counting from the 5′ end); and
[0483] (iii) phosphorothioate internucleotide linkages between nucleotide positions 1 and 2, between nucleotide positions 2 and 3, between nucleotide positions 21 and 22, and between nucleotide positions 22 and 23 (counting from the 5′ end);
   wherein the RNAi agents have a two nucleotide overhang at the 3′-end of the antisense strand, and a blunt end at the 5′-end of the antisense strand.

[0484] In another particular embodiment, a RNAi agent of the present invention comprises:
[0485] (a) a sense strand having:
   [0486] (i) a length of 21 nucleotides;
[0487] (ii) an ASGPR ligand attached to the 3′-end, wherein said ASGPR ligand comprises three GalNAc derivatives attached through a trivalent branched linker;
   [0488] (iii) 2′-OMe modifications at positions 1, 2, 4, 6, 8, 12, 14, 15, 17, and 19 to 21, and 2′-F modifications at positions 3, 5, 7, 9 to 11, 13, 16, and 18; and
   [0489] (iv) phosphorothioate internucleotide linkages between nucleotide positions 1 and 2, and between nucleotide positions 2 and 3 (counting from the 5′ end);
[0490] and
[0491] (b) an antisense strand having:
   [0492] (i) a length of 25 nucleotides;
[0493] (ii) 2′-OMe modifications at positions 1, 4, 6, 7, 9, 11 to 13, 15, 17, and 19 to 23, 2′-F modifications at positions 2, 3, 5, 8, 10, 14, 16, and 18, and desoxy-nucleotides (e.g. dT) at positions 24 and 25 (counting from the 5′ end); and
   [0494] (iii) phosphorothioate internucleotide linkages between nucleotide positions 1 and 2, between nucleotide positions 2 and 3, between nucleotide positions 21 and 22, and between nucleotide positions 22 and 23 (counting from the 5′ end);
      wherein the RNAi agents have a four nucleotide overhang at the 3′-end of the antisense strand, and a blunt end at the 5′-end of the antisense strand.

[0495] In another particular embodiment, a RNAi agent of the present invention comprises:
[0496] (a) a sense strand having:
   [0497] (i) a length of 21 nucleotides;
[0498] (ii) an ASGPR ligand attached to the 3′-end, wherein said ASGPR ligand comprises three GalNAc derivatives attached through a trivalent branched linker;
   [0499] (iii) 2′-OMe modifications at positions 1 to 6, 8, and 12 to 21, and 2′-F modifications at positions 7, and 9 to 11; and
   [0500] (iv) phosphorothioate internucleotide linkages between nucleotide positions 1 and 2, and between nucleotide positions 2 and 3 (counting from the 5′ end);
[0501] and
[0502] (b) an antisense strand having:
   [0503] (i) a length of 23 nucleotides;
[0504] (ii) 2′-OMe modifications at positions 1, 3 to 5, 7, 8, 10 to 13, 15, and 17 to 23, and 2′-F modifications at positions 2, 6, 9, 14, and 16 (counting from the 5′ end); and
[0505] (iii) phosphorothioate internucleotide linkages between nucleotide positions 1 and 2, between nucleotide positions 2 and 3, between nucleotide positions 21 and 22, and between nucleotide positions 22 and 23 (counting from the 5′ end);
   wherein the RNAi agents have a two nucleotide overhang at the 3′-end of the antisense strand, and a blunt end at the 5′-end of the antisense strand.

[0506] In another particular embodiment, a RNAi agent of the present invention comprises:
[0507] (a) a sense strand having:
   [0508] (i) a length of 21 nucleotides;
[0509] (ii) an ASGPR ligand attached to the 3′-end, wherein said ASGPR ligand comprises three GalNAc derivatives attached through a trivalent branched linker;
   [0510] (iii) 2′-OMe modifications at positions 1 to 6, 8, and 12 to 21, and 2′-F modifications at positions 7, and 9 to 11; and
   [0511] (iv) phosphorothioate internucleotide linkages between nucleotide positions 1 and 2, and between nucleotide positions 2 and 3 (counting from the 5′ end);
[0512] and
[0513] (b) an antisense strand having:
   [0514] (i) a length of 23 nucleotides;
[0515] (ii) 2′-OMe modifications at positions 1, 3 to 5, 7, 10 to 13, 15, and 17 to 23, and 2′-F modifications at positions 2, 6, 8, 9, 14, and 16 (counting from the 5′ end); and
[0516] (iii) phosphorothioate internucleotide linkages between nucleotide positions 1 and 2, between nucleotide positions 2 and 3, between nucleotide positions 21 and 22, and between nucleotide positions 22 and 23 (counting from the 5′ end);
   wherein the RNAi agents have a two nucleotide overhang at the 3′-end of the antisense strand, and a blunt end at the 5′-end of the antisense strand.

[0517] In another particular embodiment, a RNAi agent of the present invention comprises:
[0518] (a) a sense strand having:
   [0519] (i) a length of 19 nucleotides;
[0520] (ii) an ASGPR ligand attached to the 3′-end, wherein said ASGPR ligand comprises three GalNAc derivatives attached through a trivalent branched linker;
   [0521] (iii) 2′-OMe modifications at positions 1 to 4, 6, and 10 to 19, and 2′-F modifications at positions 5, and 7 to 9; and
   [0522] (iv) phosphorothioate internucleotide linkages between nucleotide positions 1 and 2, and between nucleotide positions 2 and 3 (counting from the 5′ end);
[0523] and
[0524] (b) an antisense strand having:
   [0525] (i) a length of 21 nucleotides;
[0526] (ii) 2′-OMe modifications at positions 1, 3 to 5, 7, 10 to 13, 15, and 17 to 21, and 2′-F modifications at positions 2, 6, 8, 9, 14, and 16 (counting from the 5′ end); and
[0527] (iii) phosphorothioate internucleotide linkages between nucleotide positions 1 and 2, between nucleotide positions 2 and 3, between nucleotide positions 19 and 20, and between nucleotide positions 20 and 21 (counting from the 5′ end);
   wherein the RNAi agents have a two nucleotide overhang at the 3′-end of the antisense strand, and a blunt end at the 5′-end of the antisense strand.

[0528] In certain embodiments, the iRNA for use in the methods of the invention is an agent selected from agents listed in any one of Tables 2, 3, 6, and 7. These agents may further comprise a ligand.

### III. iRNAs Conjugated to Ligands

[0529] Another modification of the RNA of an iRNA of the invention involves chemically linking to the iRNA one or more ligands, moieties or conjugates that enhance the activity, cellular distribution, or cellular uptake of the iRNA e.g., into a cell. Such moieties include but are not limited to lipid moieties such as a cholesterol moiety (Letsinger et al., Proc. Natl. Acid. Sci. USA, 1989, 86: 6553-6556). In other embodiments, the ligand is cholic acid (Manoharan et al., Biorg. Med. Chem. Let., 1994, 4:1053-1060), a thioether, e.g., beryl-S-tritylthiol (Manoharan et al., Ann. N.Y. Acad. Sci., 1992, 660:306-309; Manoharan et al., Biorg. Med. Chem. Let., 1993, 3:2765-2770), a thiocholesterol (Oberhauser et al., Nucl. Acids Res., 1992, 20:533-538), an aliphatic chain, e.g., dodecandiol or undecyl residues (Saison-Behmoaras et al., EMBO J, 1991, 10:1111-1118; Kabanov et al., FEBS Lett., 1990, 259:327-330; Svinarchuk et al., Biochimie, 1993, 75:49-54), a phospholipid, e.g., di-hexadecyl-rac-glycerol or triethyl-ammonium 1,2-di-O-hexadecyl-rac-glycero-3-phosphonate (Manoharan et al., Tetrahedron Lett., 1995, 36:3651-3654; Shea et al., Nucl. Acids Res., 1990, 18:3777-3783), a polyamine or a polyethylene glycol chain (Manoharan et al., Nucleosides & Nucleotides, 1995, 14:969-973), or adamantane acetic acid (Manoharan et al., Tetrahedron Lett., 1995, 36:3651-3654), a palmityl moiety (Mishra et al., Biochim. Biophys. Acta, 1995, 1264:229-237), or an octadecylamine or hexylamino-carbonyloxycholesterol moiety (Crooke et al., J. Pharmacol. Exp. Ther., 1996, 277:923-937).

[0530] In certain embodiments, a ligand alters the distribution, targeting, or lifetime of an iRNA agent into which it is incorporated. In preferred embodiments a ligand provides an enhanced affinity for a selected target, e.g., molecule, cell or cell type, compartment, e.g., a cellular or organ compartment, tissue, organ or region of the body, as, e.g., compared to a species absent such a ligand. Preferred ligands do not take part in duplex pairing in a duplexed nucleic acid.

[0531] Ligands can include a naturally occurring substance, such as a protein (e.g., human serum albumin (HSA), low-density lipoprotein (LDL), or globulin); carbohydrate (e.g., a dextran, pullulan, chitin, chitosan, inulin, cyclodextrin, N-acetylglucosamine, N-acetylgalactosamine, or hyaluronic acid); or a lipid. The ligand can also be a recombinant or synthetic molecule, such as a synthetic polymer, e.g., a synthetic polyamino acid. Examples of polyamino acids include polyamino acid is a polylysine (PLL), poly L-aspartic acid, poly L-glutamic acid, styrene-maleic acid anhydride copolymer, poly(L-lactide-co-glycolied) copolymer, divinyl ether-maleic anhydride copolymer, N-(2-hydroxypropyl)methacrylamide copolymer (HMPA), polyethylene glycol (PEG), polyvinyl alcohol (PVA), polyurethane, poly(2-ethylacryllic acid), N-isopropylacrylamide polymers, or polyphosphazine. Example of polyamines include: polyethylenimine, polylysine (PLL), spermine, spermidine, polyamine, pseudopeptide-polyamine, peptidomimetic polyamine, dendrimer polyamine, arginine, amidine, protamine, cationic lipid, cationic porphyrin, quaternary salt of a polyamine, or an alpha helical peptide.

[0532] Ligands can also include targeting groups, e.g., a cell or tissue targeting agent, e.g., a lectin, glycoprotein, lipid or protein, e.g., an antibody, that binds to a specified cell type such as a kidney cell. A targeting group can be a thyrotropin, melanotropin, lectin, glycoprotein, surfactant protein A, Mucin carbohydrate, multivalent lactose, multivalent galactose, N-acetyl-galactosamine, N-acetyl-glucosamine multivalent mannose, multivalent fucose, glycosylated polyaminoacids, multivalent galactose, transferrin, bisphosphonate, polyglutamate, polyaspartate, a lipid, cholesterol, a steroid, bile acid, folate, vitamin B12, vitamin A, biotin, or an RGD peptide or RGD peptide mimetic. In certain embodiments, the ligand is a multivalent galactose, e.g., an N-acetyl-galactosamine.

[0533] Other examples of ligands include dyes, intercalating agents (e.g. acridines), cross-linkers (e.g. psoralene, mitomycin C), porphyrins (TPPC4, texaphyrin, Sapphyrin), polycyclic aromatic hydrocarbons (e.g., phenazine, dihydrophenazine), artificial endonucleases (e.g. EDTA), lipophilic molecules, e.g., cholesterol, cholic acid, adamantane acetic acid, 1-pyrene butyric acid, dihydrotestosterone, 1,3-Bis-O(hexadecyl)glycerol, geranyloxyhexyl group, hexadecylglycerol, borneol, menthol, 1,3-propanediol, heptadecyl group, palmitic acid, myristic acid, O3-(oleoyl)lithocholic acid, O3-(oleoyl)cholenic acid, dimethoxytrityl, or phenoxazine) and peptide conjugates (e.g., antennapedia peptide, Tat peptide), alkylating agents, phosphate, amino, mercapto, PEG (e.g., PEG-40K), MPEG, [MPEG]₂, polyamino, alkyl, substituted alkyl, radiolabeled markers, enzymes, haptens (e.g. biotin), transport/absorption facilitators (e.g., aspirin, vitamin E, folic acid), synthetic ribonucleases (e.g., imidazole, bisimidazole, histamine, imidazole clusters, acridine-imidazole conjugates, Eu3+ complexes of tetraazamacrocycles), dinitrophenyl, HRP, or AP.

[0534] Ligands can be proteins, e.g., glycoproteins, or peptides, e.g., molecules having a specific affinity for a co-ligand, or antibodies e.g., an antibody, that binds to a specified cell type such as a hepatic cell. Ligands can also include hormones and hormone receptors. They can also include non-peptidic species, such as lipids, lectins, carbohydrates, vitamins, cofactors, multivalent lactose, multivalent galactose, N-acetyl-galactosamine, N-acetyl-glucosamine multivalent mannose, or multivalent fucose. The ligand can be, for example, a lipopolysaccharide, an activator of p38 MAP kinase, or an activator of NF-κB.

[0535] The ligand can be a substance, e.g., a drug, which can increase the uptake of the iRNA agent into the cell, for example, by disrupting the cell's cytoskeleton, e.g., by disrupting the cell's microtubules, microfilaments, or intermediate filaments. The drug can be, for example, taxol, vincristine, vinblastine, cytochalasin, nocodazole, japlakinolide, latrunculin A, phalloidin, swinholide A, indanocine, or myoservin.

[0536] In some embodiments, a ligand attached to an iRNA as described herein acts as a pharmacokinetic modulator (PK modulator). PK modulators include lipophiles, bile acids, steroids, phospholipid analogues, peptides, protein binding agents, PEG, vitamins, etc. Exemplary PK modulators include, but are not limited to, cholesterol, fatty acids, cholic acid, lithocholic acid, dialkylglycerides, diacylglyceride, phospholipids, sphingolipids, naproxen, ibuprofen, vitamin E, biotin. Oligonucleotides that comprise a number of phosphorothioate linkages are also known to bind to serum protein, thus short oligonucleotides, e.g., oligonucleotides of about 5 bases, 10 bases, 15 bases, or 20 bases, comprising multiple of phosphorothioate linkages in the backbone are also amenable to the present invention as ligands (e.g. as PK modulating ligands). In addition, aptamers that bind serum components (e.g. serum proteins) are also suitable for use as PK modulating ligands in the embodiments described herein.

[0537] Ligand-conjugated iRNAs of the invention may be synthesized by the use of an oligonucleotide that bears a pendant reactive functionality, such as that derived from the attachment of a linking molecule onto the oligonucleotide (described below). This reactive oligonucleotide may be reacted directly with commercially-available ligands, ligands that are synthesized bearing any of a variety of protecting groups, or ligands that have a linking moiety attached thereto.

[0538] The oligonucleotides used in the conjugates of the present invention may be conveniently and routinely made through the well-known technique of solid-phase synthesis. Equipment for such synthesis is sold by several vendors including, for example, Applied Biosystems® (Foster City, Calif.). Any other methods for such synthesis known in the art may additionally or alternatively be employed. It is also known to use similar techniques to prepare other oligonucleotides, such as the phosphorothioates and alkylated derivatives.

[0539] In the ligand-conjugated iRNAs and ligand-molecule bearing sequence-specific linked nucleosides of the present invention, the oligonucleotides and oligonucleosides may be assembled on a suitable DNA synthesizer utilizing standard nucleotide or nucleoside precursors, or nucleotide or nucleoside conjugate precursors that already bear the linking moiety, ligand-nucleotide or nucleoside-conjugate precursors that already bear the ligand molecule, or non-nucleoside ligand-bearing building blocks.

[0540] When using nucleotide-conjugate precursors that already bear a linking moiety, the synthesis of the sequence-specific linked nucleosides is typically completed, and the ligand molecule is then reacted with the linking moiety to form the ligand-conjugated oligonucleotide. In some embodiments, the oligonucleotides or linked nucleosides of the present invention are synthesized by an automated synthesizer using phosphoramidites derived from ligand-nucleoside conjugates in addition to the standard phosphoramidites and non-standard phosphoramidites that are commercially available and routinely used in oligonucleotide synthesis.

### A. Lipid Conjugates

[0541] In certain embodiments, the ligand or conjugate is a lipid or lipid-based molecule. Such a lipid or lipid-based molecule preferably binds a serum protein, e.g., human serum albumin (HSA). An HSA binding ligand allows for distribution of the conjugate to a target tissue, e.g., a non-kidney target tissue of the body. For example, the target tissue can be the liver, including parenchymal cells of the liver. Other molecules that can bind HSA can also be used as ligands. For example, naproxen or aspirin can be used. A lipid or lipid-based ligand can (a) increase resistance to degradation of the conjugate, (b) increase targeting or transport into a target cell or cell membrane, or (c) can be used to adjust binding to a serum protein, e.g., HSA.

[0542] A lipid based ligand can be used to inhibit, e.g., control the binding of the conjugate to a target tissue. For example, a lipid or lipid-based ligand that binds to HSA more strongly will be less likely to be targeted to the kidney and therefore less likely to be cleared from the body. A lipid or lipid-based ligand that binds to HSA less strongly can be used to target the conjugate to the kidney.

[0543] In certain embodiments, the lipid based ligand binds HSA. Preferably, it binds HSA with a sufficient affinity such that the conjugate will be preferably distributed to a non-kidney tissue. However, it is preferred that the affinity not be so strong that the HSA-ligand binding cannot be reversed.

[0544] In other embodiments, the lipid based ligand binds HSA weakly or not at all, such that the conjugate will be preferably distributed to the kidney. Other moieties that target to kidney cells can also be used in place of, or in addition to, the lipid based ligand.

[0545] In another aspect, the ligand is a moiety, e.g., a vitamin, which is taken up by a target cell, e.g., a proliferating cell. These are particularly useful for treating disorders characterized by unwanted cell proliferation, e.g., of the malignant or non-malignant type, e.g., cancer cells.

[0546] Exemplary vitamins include vitamin A, E, and K. Other exemplary vitamins include are B vitamin, e.g., folic acid, B12, riboflavin, biotin, pyridoxal or other vitamins or nutrients taken up by target cells such as liver cells. Also included are HSA and low density lipoprotein (LDL).

### B. Cell Permeation Agents

[0547] In another aspect, the ligand is a cell-permeation agent, preferably a helical cell-permeation agent. Preferably, the agent is amphipathic. An exemplary agent is a peptide such as tat or antennopedia. If the agent is a peptide, it can be modified, including a peptidylmimetic, invertomers, non-peptide or pseudo-peptide linkages, and use of D-amino acids. The helical agent is preferably an alpha-helical agent, which preferably has a lipophilic and a lipophobic phase.

[0548] The ligand can be a peptide or peptidomimetic. A peptidomimetic (also referred to herein as an oligopeptidomimetic) is a molecule capable of folding into a defined three-dimensional structure similar to a natural peptide. The attachment of peptide and peptidomimetics to iRNA agents can affect pharmacokinetic distribution of the iRNA, such as by enhancing cellular recognition and absorption. The peptide or peptidomimetic moiety can be about 5-50 amino acids long, e.g., about 5, 10, 15, 20, 25, 30, 35, 40, 45, or 50 amino acids long.

[0549] A peptide or peptidomimetic can be, for example, a cell permeation peptide, cationic peptide, amphipathic peptide, or hydrophobic peptide (e.g., consisting primarily of Tyr, Trp, or Phe). The peptide moiety can be a dendrimer peptide, constrained peptide or crosslinked peptide. In another alternative, the peptide moiety can include a hydrophobic membrane translocation sequence (MTS). An exemplary hydrophobic MTS-containing peptide is RFGF having the amino acid sequence AAVALLPAVLLALLAP (SEQ ID NO: 14). An RFGF analogue (e.g., amino acid sequence AALLPVLLAAP (SEQ ID NO:15) containing a hydrophobic MTS can also be a targeting moiety. The peptide moiety can be a “delivery” peptide, which can carry large polar molecules including peptides, oligonucleotides, and protein across cell membranes. For example, sequences from the HIV Tat protein (GRKKRRQRRRPPQ (SEQ ID NO:16) and the Drosophila Antennapedia protein (RQIKIWFQNRRMKWKK (SEQ ID NO:17) have been found to be capable of functioning as delivery peptides. A peptide or peptidomimetic can be encoded by a random sequence of DNA, such as a peptide identified from a phage-display library, or one-bead-one-compound (OBOC) combinatorial library (Lam et al., Nature, 354:82-84, 1991). Examples of a peptide or peptidomimetic tethered to a dsRNA agent via an incorporated monomer unit for cell targeting purposes is an arginine-glycine-aspartic acid (RGD)-peptide, or RGD mimic. A peptide moiety can range in length from about 5 amino acids to about 40 amino acids. The peptide moieties can have a structural modification, such as to increase stability or direct conformational properties. Any of the structural modifications described below can be utilized.

[0550] An RGD peptide for use in the compositions and methods of the invention may be linear or cyclic, and may be modified, e.g., glycosylated or methylated, to facilitate targeting to a specific tissue(s). RGD-containing peptides and peptidiomimemtics may include D-amino acids, as well as synthetic RGD mimics. In addition to RGD, one can use other moieties that target the integrin ligand. Preferred conjugates of this ligand target PECAM-1 or VEGF.

[0551] A “cell permeation peptide” is capable of permeating a cell, e.g., a microbial cell, such as a bacterial or fungal cell, or a mammalian cell, such as a human cell. A microbial cell-permeating peptide can be, for example, an α-helical linear peptide (e.g., LL-37 or Ceropin P1), a disulfide bond-containing peptide (e.g., α-defensin, β-defensin or bactenecin), or a peptide containing only one or two dominating amino acids (e.g., PR-39 or indolicidin). A cell permeation peptide can also include a nuclear localization signal (NLS). For example, a cell permeation peptide can be a bipartite amphipathic peptide, such as MPG, which is derived from the fusion peptide domain of HIV-1 gp41 and the NLS of SV40 large T antigen (Simeoni et al., Nucl. Acids Res. 31:2717-2724, 2003).

### C. Carbohydrate Conjugates

[0552] In some embodiments of the compositions and methods of the invention, an iRNA further comprises a carbohydrate. The carbohydrate conjugated iRNA is advantageous for the in vivo delivery of nucleic acids, as well as compositions suitable for in vivo therapeutic use, as described herein. As used herein, “carbohydrate” refers to a compound which is either a carbohydrate per se made up of one or more monosaccharide units having at least 6 carbon atoms (which can be linear, branched or cyclic) with an oxygen, nitrogen or sulfur atom bonded to each carbon atom; or a compound having as a part thereof a carbohydrate moiety made up of one or more monosaccharide units each having at least six carbon atoms (which can be linear, branched or cyclic), with an oxygen, nitrogen or sulfur atom bonded to each carbon atom. Representative carbohydrates include the sugars (mono-, di-, tri-, and oligosaccharides containing from about 4, 5, 6, 7, 8, or 9 monosaccharide units), and polysaccharides such as starches, glycogen, cellulose and polysaccharide gums. Specific monosaccharides include C5 and above (e.g., C5, C6, C7, or C8) sugars; di- and trisaccharides include sugars having two or three monosaccharide units (e.g., C5, C6, C7, or C8).

[0553] In certain embodiments, a carbohydrate conjugate for use in the compositions and methods of the invention is a monosaccharide.

[0554] In certain embodiments, the monosaccharide is an N-acetylgalactosamine (GalNAc). GalNAc conjugates, which comprise one or more N-acetylgalactosamine (GalNAc) derivatives, are described, for example, in U.S. Pat. No. 8,106,022, the entire content of which is hereby incorporated herein by reference. In some embodiments, the GalNAc conjugate serves as a ligand that targets the iRNA to particular cells. In some embodiments, the GalNAc conjugate targets the iRNA to liver cells, e.g., by serving as a ligand for the asialoglycoprotein receptor of liver cells (e.g., hepatocytes).

[0555] In some embodiments, the carbohydrate conjugate comprises one or more GalNAc derivatives. The GalNAc derivatives may be attached via a linker, e.g., a bivalent or trivalent branched linker. In some embodiments the GalNAc conjugate is conjugated to the 3′ end of the sense strand. In some embodiments, the GalNAc conjugate is conjugated to the iRNA agent (e.g., to the 3′ end of the sense strand) via a linker, e.g., a linker as described herein. In some embodiments the GalNAc conjugate is conjugated to the 5′ end of the sense strand. In some embodiments, the GalNAc conjugate is conjugated to the iRNA agent (e.g., to the 5′ end of the sense strand) via a linker, e.g., a linker as described herein.

[0556] In certain embodiments of the invention, the GalNAc or GalNAc derivative is attached to an iRNA agent of the invention via a monovalent linker. In some embodiments, the GalNAc or GalNAc derivative is attached to an iRNA agent of the invention via a bivalent linker. In yet other embodiments of the invention, the GalNAc or GalNAc derivative is attached to an iRNA agent of the invention via a trivalent linker. In other embodiments of the invention, the GalNAc or GalNAc derivative is attached to an iRNA agent of the invention via a tetravalent linker.

[0557] In certain embodiments, the double stranded RNAi agents of the invention comprise one GalNAc or GalNAc derivative attached to the iRNA agent. In certain embodiments, the double stranded RNAi agents of the invention comprise a plurality (e.g., 2, 3, 4, 5, or 6) GalNAc or GalNAc derivatives, each independently attached to a plurality of nucleotides of the double stranded RNAi agent through a plurality of monovalent linkers.

[0558] In some embodiments, for example, when the two strands of an iRNA agent of the invention are part of one larger molecule connected by an uninterrupted chain of nucleotides between the 3′-end of one strand and the 5′-end of the respective other strand forming a hairpin loop comprising, a plurality of unpaired nucleotides, each unpaired nucleotide within the hairpin loop may independently comprise a GalNAc or GalNAc derivative attached via a monovalent linker. The hairpin loop may also be formed by an extended overhang in one strand of the duplex.

[0559] In some embodiments, for example, when the two strands of an iRNA agent of the invention are part of one larger molecule connected by an uninterrupted chain of nucleotides between the 3′-end of one strand and the 5′-end of the respective other strand forming a hairpin loop comprising, a plurality of unpaired nucleotides, each unpaired nucleotide within the hairpin loop may independently comprise a GalNAc or GalNAc derivative attached via a monovalent linker. The hairpin loop may also be formed by an extended overhang in one strand of the duplex.

[0560] In one embodiment, a carbohydrate conjugate for use in the compositions and methods of the invention is selected from the group consisting of:

[chemical structure]

[chemical structure]

[chemical structure]

[chemical structure]

[chemical structure]

[chemical structure]

[chemical structure]

[chemical structure]

[chemical structure]

[0561] In another embodiment, a carbohydrate conjugate for use in the compositions and methods of the invention is a monosaccharide. In one embodiment, the monosaccharide is an N-acetylgalactosamine, such as

[chemical structure]

[0562] In some embodiments, the RNAi agent is attached to the carbohydrate conjugate via a linker as shown in the following schematic, wherein X is O or S

[chemical structure]

[0563] In some embodiments, the RNAi agent is conjugated to L96 as defined in Table 1 and shown below:

[chemical structure]

[0564] Another representative carbohydrate conjugate for use in the embodiments described herein includes, but is not limited to,

[chemical structure]

(Formula XXXVI), when one of X or Y is an oligonucleotide, the other is a hydrogen.

[0565] In some embodiments, a suitable ligand is a ligand disclosed in WO 2019/055633, the entire contents of which are incorporated herein by reference. In one embodiment the ligand comprises the structure below:

[chemical structure]

[0566] In certain embodiments of the invention, the GalNAc or GalNAc derivative is attached to an iRNA agent of the invention via a monovalent linker. In some embodiments, the GalNAc or GalNAc derivative is attached to an iRNA agent of the invention via a bivalent linker. In yet other embodiments of the invention, the GalNAc or GalNAc derivative is attached to an iRNA agent of the invention via a trivalent linker.

[0567] In one embodiment, the double stranded RNAi agents of the invention comprise one or more GalNAc or GalNAc derivative attached to the iRNA agent. The GalNAc may be attached to any nucleotide via a linker on the sense strand or antisense strand. The GalNac may be attached to the 5′-end of the sense strand, the 3′ end of the sense strand, the 5′-end of the antisense strand, or the 3′-end of the antisense strand. In one embodiment, the GalNAc is attached to the 3′ end of the sense strand, e.g., via a trivalent linker.

[0568] In other embodiments, the double stranded RNAi agents of the invention comprise a plurality (e.g., 2, 3, 4, 5, or 6) GalNAc or GalNAc derivatives, each independently attached to a plurality of nucleotides of the double stranded RNAi agent through a plurality of linkers, e.g., monovalent linkers.

[0569] In some embodiments, for example, when the two strands of an iRNA agent of the invention is part of one larger molecule connected by an uninterrupted chain of nucleotides between the 3′-end of one strand and the 5′-end of the respective other strand forming a hairpin loop comprising, a plurality of unpaired nucleotides, each unpaired nucleotide within the hairpin loop may independently comprise a GalNAc or GalNAc derivative attached via a monovalent linker.

[0570] In some embodiments, the carbohydrate conjugate further comprises one or more additional ligands as described above, such as, but not limited to, a PK modulator or a cell permeation peptide.

[0571] Additional carbohydrate conjugates and linkers suitable for use in the present invention include those described in PCT Publication Nos. WO 2014/179620 and WO 2014/179627, the entire contents of each of which are incorporated herein by reference.

### D. Linkers

[0572] In some embodiments, the conjugate or ligand described herein can be attached to an iRNA oligonucleotide with various linkers that can be cleavable or non-cleavable.

[0573] The term “linker” or “linking group” means an organic moiety that connects two parts of a compound, e.g., covalently attaches two parts of a compound. Linkers typically comprise a direct bond or an atom such as oxygen or sulfur, a unit such as NR8, C(O), C(O)NH, SO, SO₂, SO₂NH or a chain of atoms, such as, but not limited to, substituted or unsubstituted alkyl, substituted or unsubstituted alkenyl, substituted or unsubstituted alkynyl, arylalkyl, arylalkenyl, arylalkynyl, heteroarylalkyl, heteroarylalkenyl, heteroarylalkynyl, heterocyclylalkyl, heterocyclylalkenyl, heterocyclylalkynyl, aryl, heteroaryl, heterocyclyl, cycloalkyl, cycloalkenyl, alkylarylalkyl, alkylarylalkenyl, alkylarylalkynyl, alkenylarylalkyl, alkenylarylalkenyl, alkenylarylalkynyl, alkynylarylalkyl, alkynylarylalkenyl, alkynylarylalkynyl, alkylheteroarylalkyl, alkylheteroarylalkenyl, alkylheteroarylalkynyl, alkenylheteroarylalkyl, alkenylheteroarylalkenyl, alkenylheteroarylalkynyl, alkynylheteroarylalkyl, alkynylheteroarylalkenyl, alkynylheteroarylalkynyl, alkylheterocyclylalkyl, alkylheterocyclylalkenyl, alkylhererocyclylalkynyl, alkenylheterocyclylalkyl, alkenylheterocyclylalkenyl, alkenylheterocyclylalkynyl, alkynylheterocyclylalkyl, alkynylheterocyclylalkenyl, alkynylheterocyclylalkynyl, alkylaryl, alkenylaryl, alkynylaryl, alkylheteroaryl, alkenylheteroaryl, alkynylhereroaryl, which one or more methylenes can be interrupted or terminated by O, S, S(O), SO₂, N(R8), C(O), substituted or unsubstituted aryl, substituted or unsubstituted heteroaryl, or substituted or unsubstituted heterocyclic; where R8 is hydrogen, acyl, aliphatic, or substituted aliphatic. In one embodiment, the linker is about 1-24 atoms, 2-24, 3-24, 4-24, 5-24, 6-24, 6-18, 7-18, 8-18, 7-17, 8-17, 6-16, 7-17, or 8-16 atoms.

[0574] A cleavable linking group is one which is sufficiently stable outside the cell, but which upon entry into a target cell is cleaved to release the two parts the linker is holding together. In a preferred embodiment, the cleavable linking group is cleaved at least about 10 times, 20, times, 30 times, 40 times, 50 times, 60 times, 70 times, 80 times, 90 times, or more, or at least 100 times faster in a target cell or under a first reference condition (which can, e.g., be selected to mimic or represent intracellular conditions) than in the blood of a subject, or under a second reference condition (which can, e.g., be selected to mimic or represent conditions found in the blood or serum).

[0575] Cleavable linking groups are susceptible to cleavage agents, e.g., pH, redox potential, or the presence of degradative molecules. Generally, cleavage agents are more prevalent or found at higher levels or activities inside cells than in serum or blood. Examples of such degradative agents include: redox agents which are selected for particular substrates or which have no substrate specificity, including, e.g., oxidative or reductive enzymes or reductive agents such as mercaptans, present in cells, that can degrade a redox cleavable linking group by reduction; esterases; endosomes or agents that can create an acidic environment, e.g., those that result in a pH of five or lower; enzymes that can hydrolyze or degrade an acid cleavable linking group by acting as a general acid, peptidases (which can be substrate specific), and phosphatases.

[0576] A cleavable linkage group, such as a disulfide bond can be susceptible to pH. The pH of human serum is 7.4, while the average intracellular pH is slightly lower, ranging from about 7.1-7.3. Endosomes have a more acidic pH, in the range of 5.5-6.0, and lysosomes have an even more acidic pH at around 5.0. Some linkers will have a cleavable linking group that is cleaved at a preferred pH, thereby releasing a cationic lipid from the ligand inside the cell, or into the desired compartment of the cell.

[0577] A linker can include a cleavable linking group that is cleavable by a particular enzyme. The type of cleavable linking group incorporated into a linker can depend on the cell to be targeted. For example, a liver-targeting ligand can be linked to a cationic lipid through a linker that includes an ester group. Liver cells are rich in esterases, and therefore the linker will be cleaved more efficiently in liver cells than in cell types that are not esterase-rich. Other cell-types rich in esterases include cells of the lung, renal cortex, and testis.

[0578] Linkers that contain peptide bonds can be used when targeting cell types rich in peptidases, such as liver cells and synoviocytes.

[0579] In general, the suitability of a candidate cleavable linking group can be evaluated by testing the ability of a degradative agent (or condition) to cleave the candidate linking group. It will also be desirable to also test the candidate cleavable linking group for the ability to resist cleavage in the blood or when in contact with other non-target tissue. Thus, one can determine the relative susceptibility to cleavage between a first and a second condition, where the first is selected to be indicative of cleavage in a target cell and the second is selected to be indicative of cleavage in other tissues or biological fluids, e.g., blood or serum. The evaluations can be carried out in cell free systems, in cells, in cell culture, in organ or tissue culture, or in whole animals. It can be useful to make initial evaluations in cell-free or culture conditions and to confirm by further evaluations in whole animals. In preferred embodiments, useful candidate compounds are cleaved at least about 2, 4, 10, 20, 30, 40, 50, 60, 70, 80, 90, or 100 times faster in the cell (or under in vitro conditions selected to mimic intracellular conditions) as compared to blood or serum (or under in vitro conditions selected to mimic extracellular conditions).

i. Redox Cleavable Linking Groups

[0580] In certain embodiments, a cleavable linking group is a redox cleavable linking group that is cleaved upon reduction or oxidation. An example of reductively cleavable linking group is a disulphide linking group (—S—S—). To determine if a candidate cleavable linking group is a suitable “reductively cleavable linking group,” or for example is suitable for use with a particular iRNA moiety and particular targeting agent one can look to methods described herein. For example, a candidate can be evaluated by incubation with dithiothreitol (DTT), or other reducing agent using reagents know in the art, which mimic the rate of cleavage which would be observed in a cell, e.g., a target cell. The candidates can also be evaluated under conditions which are selected to mimic blood or serum conditions. In one, candidate compounds are cleaved by at most about 10% in the blood. In other embodiments, useful candidate compounds are degraded at least about 2, 4, 10, 20, 30, 40, 50, 60, 70, 80, 90, or about 100 times faster in the cell (or under in vitro conditions selected to mimic intracellular conditions) as compared to blood (or under in vitro conditions selected to mimic extracellular conditions). The rate of cleavage of candidate compounds can be determined using standard enzyme kinetics assays under conditions chosen to mimic intracellular media and compared to conditions chosen to mimic extracellular media.

ii. Phosphate-Based Cleavable Linking Groups

[0581] In other embodiments, a cleavable linker comprises a phosphate-based cleavable linking group. A phosphate-based cleavable linking group is cleaved by agents that degrade or hydrolyze the phosphate group. An example of an agent that cleaves phosphate groups in cells are enzymes such as phosphatases in cells. Examples of phosphate-based linking groups are —O—P(O)(ORk)-O—, —O—P(S)(ORk)-O—, —O—P(S)(SRk)-O—, —S—P(O)(ORk)-O—, —O—P(O)(ORk)-S—, —S—P(O)(ORk)-S—, —O—P(S)(ORk)-S—, —S—P(S)(ORk)-O—, —O—P(O)(Rk)-O—, —O—P(S)(Rk)-O—, —S—P(O)(Rk)-O—, —S—P(S)(Rk)-O—, —S—P(O)(Rk)-S—, —O—P(S)(Rk)-S—. Preferred embodiments are —O—P(O)(OH)—O—, —O—P(S)(OH)—O—, —O—P(S)(SH)—O—, —S—P(O)(OH)—O—, —O—P(O)(OH)—S—, —S—P(O)(OH)—S—, —O—P(S)(OH)—S—, —S—P(S)(OH)—O—, —O—P(O)(H)—O—, —O—P(S)(H)—O—, —S—P(O)(H)—O, —S—P(S)(H)—O—, —S—P(O)(H)—S—, and —O—P(S)(H)—S—. A preferred embodiment is —O—P(O)(OH)—O—. These candidates can be evaluated using methods analogous to those described above.

iii. Acid Cleavable Linking Groups

[0582] In other embodiments, a cleavable linker comprises an acid cleavable linking group. An acid cleavable linking group is a linking group that is cleaved under acidic conditions. In preferred embodiments acid cleavable linking groups are cleaved in an acidic environment with a pH of about 6.5 or lower (e.g., about 6.0, 5.5, 5.0, or lower), or by agents such as enzymes that can act as a general acid. In a cell, specific low pH organelles, such as endosomes and lysosomes can provide a cleaving environment for acid cleavable linking groups. Examples of acid cleavable linking groups include but are not limited to hydrazones, esters, and esters of amino acids. Acid cleavable groups can have the general formula —C═NN—, C(O)O, or —OC(O). A preferred embodiment is when the carbon attached to the oxygen of the ester (the alkoxy group) is an aryl group, substituted alkyl group, or tertiary alkyl group such as dimethyl pentyl or t-butyl. These candidates can be evaluated using methods analogous to those described above.

iv. Ester-Based Linking Groups

[0583] In other embodiments, a cleavable linker comprises an ester-based cleavable linking group. An ester-based cleavable linking group is cleaved by enzymes such as esterases and amidases in cells. Examples of ester-based cleavable linking groups include, but are not limited to, esters of alkylene, alkenylene and alkynylene groups. Ester cleavable linking groups have the general formula —C(O)O—, or —OC(O)—. These candidates can be evaluated using methods analogous to those described above.

v. Peptide-Based Cleaving Groups

[0584] In yet other embodiments, a cleavable linker comprises a peptide-based cleavable linking group. A peptide-based cleavable linking group is cleaved by enzymes such as peptidases and proteases in cells. Peptide-based cleavable linking groups are peptide bonds formed between amino acids to yield oligopeptides (e.g., dipeptides, tripeptides etc.) and polypeptides. Peptide-based cleavable groups do not include the amide group (—C(O)NH—). The amide group can be formed between any alkylene, alkenylene or alkynelene. A peptide bond is a special type of amide bond formed between amino acids to yield peptides and proteins. The peptide based cleavage group is generally limited to the peptide bond (i.e., the amide bond) formed between amino acids yielding peptides and proteins and does not include the entire amide functional group. Peptide-based cleavable linking groups have the general formula —NHCHRAC(O)NHCHRBC(O)—, where RA and RB are the R groups of the two adjacent amino acids. These candidates can be evaluated using methods analogous to those described above.

[0585] In some embodiments, an iRNA of the invention is conjugated to a carbohydrate through a linker. Non-limiting examples of iRNA carbohydrate conjugates with linkers of the compositions and methods of the invention include, but are not limited to,

[chemical structure]

[chemical structure]

[chemical structure]

when one of X or Y is an oligonucleotide, the other is a hydrogen.

[0586] In certain embodiments of the compositions and methods of the invention, a ligand is one or more “GalNAc” (N-acetylgalactosamine) derivatives attached through a bivalent or trivalent branched linker.

[0587] In one embodiment, a dsRNA of the invention is conjugated to a bivalent or trivalent branched linker selected from the group of structures shown in any of formula (XLV)-(XLVI):

[chemical structure]

wherein:
[0588] q2A, q2B, q3A, q3B, q4A, q4B, q5A, q5B and q5C represent independently for each occurrence 0-20 and wherein the repeating unit can be the same or different;
[0589] P^{2A}, P^{2B}, P^{3A}, P^{3B}, P^{4A}, P^{4B}, P^{5A}, P^{5B}, P^{5C}, T^{2A}, T^{2B}, T^{3A}, T^{3B}, T^{4A}, T^{4B}, T^{4A}, T^{5B}, T^{5C} are each independently for each occurrence absent, CO, NH, O, S, OC(O), NHC(O), CH₂, CH₂NH or CH₂O;
[0590] Q^{2A}, Q^{2B}, Q^{3A}, Q^{3B}, Q^{4A}, Q^{4B}, Q^{5A}, Q^{5B}, Q^{5C} are independently for each occurrence absent, alkylene, substituted alkylene wherein one or more methylenes can be interrupted or terminated by one or more of O, S, S(O), SO₂, N(R^{N}), C(R′)═C(R″), C≡C or C(O);
[0591] R^{2A}, R^{2B}, R^{3A}, R^{3B}, R^{4A}, R^{4B}, R^{5A}, R^{5B}, R^{5C} are each independently for each occurrence absent, NH, O, S, CH₂, C(O)O, C(O)NH, NHCH(R^{a})C(O), —C(O)—CH(R^{a})—NH—, CO, CH═N—O,

[chemical structure]

or heterocyclyl; L^{2A}, L^{2B}, L^{3A}, L^{3B}, L^{4A}, L^{4B} L⁵A, L^{5B} and L⁵c represent the ligand; i.e. each independently for each occurrence a monosaccharide (such as GalNAc), disaccharide, trisaccharide, tetrasaccharide, oligosaccharide, or polysaccharide; and R^{a} is H or amino acid side chain. Trivalent conjugating GalNAc derivatives are particularly useful for use with RNAi agents for inhibiting the expression of a target gene, such as those of formula (XLIX):

[chemical structure]

wherein L^{5A}, L^{5B} and L^{5C} represent a monosaccharide, such as GalNAc derivative.

[0592] Examples of suitable bivalent and trivalent branched linker groups conjugating GalNAc derivatives include, but are not limited to, the structures recited above as formulas II, VII, XI, X, and XIII.

[0593] Representative U.S. patents that teach the preparation of RNA conjugates include, but are not limited to, U.S. Pat. Nos. 4,828,979; 4,948,882; 5,218,105; 5,525,465; 5,541,313; 5,545,730; 5,552,538; 5,578,717, 5,580,731; 5,591,584; 5,109,124; 5,118,802; 5,138,045; 5,414,077; 5,486,603; 5,512,439; 5,578,718; 5,608,046; 4,587,044; 4,605,735; 4,667,025; 4,762,779; 4,789,737; 4,824,941; 4,835,263; 4,876,335; 4,904,582; 4,958,013; 5,082,830; 5,112,963; 5,214,136; 5,082,830; 5,112,963; 5,214,136; 5,245,022; 5,254,469; 5,258,506; 5,262,536; 5,272,250; 5,292,873; 5,317,098; 5,371,241, 5,391,723; 5,416,203, 5,451,463; 5,510,475; 5,512,667; 5,514,785; 5,565,552; 5,567,810; 5,574,142; 5,585,481; 5,587,371; 5,595,726; 5,597,696; 5,599,923; 5,599,928; 5,688,941; 6,294,664; 6,320,017; 6,576,752; 6,783,931; 6,900,297; 7,037,646; and 8,106,022, the entire contents of each of which are hereby incorporated herein by reference.

[0594] It is not necessary for all positions in a given compound to be uniformly modified, and in fact more than one of the aforementioned modifications can be incorporated in a single compound or even at a single nucleoside within an iRNA. The present invention also includes iRNA compounds that are chimeric compounds.

[0595] “Chimeric” iRNA compounds or “chimeras,” in the context of this invention, are iRNA compounds, preferably dsRNAi agents, that contain two or more chemically distinct regions, each made up of at least one monomer unit, i.e., a nucleotide in the case of a dsRNA compound. These iRNAs typically contain at least one region wherein the RNA is modified so as to confer upon the iRNA increased resistance to nuclease degradation, increased cellular uptake, or increased binding affinity for the target nucleic acid. An additional region of the iRNA can serve as a substrate for enzymes capable of cleaving RNA:DNA or RNA:RNA hybrids. By way of example, RNase H is a cellular endonuclease which cleaves the RNA strand of an RNA:DNA duplex. Activation of RNase H, therefore, results in cleavage of the RNA target, thereby greatly enhancing the efficiency of iRNA inhibition of gene expression. Consequently, comparable results can often be obtained with shorter iRNAs when chimeric dsRNAs are used, compared to phosphorothioate deoxy dsRNAs hybridizing to the same target region. Cleavage of the RNA target can be routinely detected by gel electrophoresis and, if necessary, associated nucleic acid hybridization techniques known in the art.

[0596] In certain instances, the RNA of an iRNA can be modified by a non-ligand group. A number of non-ligand molecules have been conjugated to iRNAs in order to enhance the activity, cellular distribution or cellular uptake of the iRNA, and procedures for performing such conjugations are available in the scientific literature. Such non-ligand moieties have included lipid moieties, such as cholesterol (Kubo, T. et al., Biochem. Biophys. Res. Comm., 2007, 365(1):54-61; Letsinger et al., Proc. Natl. Acad. Sci. USA, 1989, 86:6553), cholic acid (Manoharan et al., Bioorg. Med. Chem. Lett., 1994, 4:1053), a thioether, e.g., hexyl-S-tritylthiol (Manoharan et al., Ann. N.Y. Acad. Sci., 1992, 660:306; Manoharan et al., Bioorg. Med. Chem. Let., 1993, 3:2765), a thiocholesterol (Oberhauser et al., Nucl. Acids Res., 1992, 20:533), an aliphatic chain, e.g., dodecandiol or undecyl residues (Saison-Behmoaras et al., EMBO J., 1991, 10:111; Kabanov et al., FEBS Lett., 1990, 259:327; Svinarchuk et al., Biochimie, 1993, 75:49), a phospholipid, e.g., di-hexadecyl-rac-glycerol or triethylammonium 1,2-di-O-hexadecyl-rac-glycero-3-H-phosphonate (Manoharan et al., Tetrahedron Lett., 1995, 36:3651; Shea et al., Nucl. Acids Res., 1990, 18:3777), a polyamine or a polyethylene glycol chain (Manoharan et al., Nucleosides & Nucleotides, 1995, 14:969), or adamantane acetic acid (Manoharan et al., Tetrahedron Lett., 1995, 36:3651), a palmityl moiety (Mishra et al., Biochim. Biophys. Acta, 1995, 1264:229), or an octadecylamine or hexylamino-carbonyl-oxycholesterol moiety (Crooke et al., J. Pharmacol. Exp. Ther., 1996, 277:923). Representative United States patents that teach the preparation of such RNA conjugates have been listed above. Typical conjugation protocols involve the synthesis of RNAs bearing an aminolinker at one or more positions of the sequence. The amino group is then reacted with the molecule being conjugated using appropriate coupling or activating reagents. The conjugation reaction can be performed either with the RNA still bound to the solid support or following cleavage of the RNA, in solution phase. Purification of the RNA conjugate by HPLC typically affords the pure conjugate.

### IV. Delivery of an iRNA of the Invention

[0597] The delivery of an iRNA of the invention to a cell e.g., a cell within a subject, such as a human subject (e.g., a subject in need thereof, such as a subject susceptible to or diagnosed with a PNPLA3-associated disorder, e.g., NAFLD) can be achieved in a number of different ways. For example, delivery may be performed by contacting a cell with an iRNA of the invention either in vitro or in vivo. In vivo delivery may also be performed directly by administering a composition comprising an iRNA, e.g., a dsRNA, to a subject. Alternatively, in vivo delivery may be performed indirectly by administering one or more vectors that encode and direct the expression of the iRNA. These alternatives are discussed further below.

[0598] In general, any method of delivering a nucleic acid molecule (in vitro or in vivo) can be adapted for use with an iRNA of the invention (see e.g., Akhtar S. and Julian R L. (1992) Trends Cell. Biol. 2(5):139-144 and WO94/02595, which are incorporated herein by reference in their entireties). For in vivo delivery, factors to consider in order to deliver an iRNA molecule include, for example, biological stability of the delivered molecule, prevention of non-specific effects, and accumulation of the delivered molecule in the target tissue. RNA interference has also shown success with local delivery to the CNS by direct injection (Dorn, G., et al. (2004) Nucleic Acids 32:e49; Tan, P H., et al (2005) Gene Ther. 12:59-66; Makimura, H., et al (2002) BMC Neurosci. 3:18; Shishkina, G T., et al (2004) Neuroscience 129:521-528; Thakker, E R., et al (2004) Proc. Natl. Acad. Sci. U.S.A. 101:17270-17275; Akaneya, Y., et al (2005) J. Neurophysiol. 93:594-602). Modification of the RNA or the pharmaceutical carrier can also permit targeting of the iRNA to the target tissue and avoid undesirable off-target effects. iRNA molecules can be modified by chemical conjugation to lipophilic groups such as cholesterol to enhance cellular uptake and prevent degradation. For example, an iRNA directed against ApoB conjugated to a lipophilic cholesterol moiety was injected systemically into mice and resulted in knockdown of apoB mRNA in both the liver and jejunum (Soutschek, J., et al (2004) Nature 432:173-178).

[0599] In an alternative embodiment, the iRNA can be delivered using drug delivery systems such as a nanoparticle, a dendrimer, a polymer, liposomes, or a cationic delivery system. Positively charged cationic delivery systems facilitate binding of an iRNA molecule (negatively charged) and also enhance interactions at the negatively charged cell membrane to permit efficient uptake of an iRNA by the cell. Cationic lipids, dendrimers, or polymers can either be bound to an iRNA, or induced to form a vesicle or micelle (see e.g., Kim S H, et al (2008) Journal of Controlled Release 129(2):107-116) that encases an iRNA. The formation of vesicles or micelles further prevents degradation of the iRNA when administered systemically. Methods for making and administering cationic-iRNA complexes are well within the abilities of one skilled in the art (see e.g., Sorensen, D R, et al (2003) J. Mol. Biol 327:761-766; Verma, U N, et al (2003) Clin. Cancer Res. 9:1291-1300; Arnold, A S et al (2007) J. Hypertens. 25:197-205, which are incorporated herein by reference in their entirety). Some non-limiting examples of drug delivery systems useful for systemic delivery of iRNAs include DOTAP (Sorensen, D R., et al (2003), supra; Verma, U N, et al (2003), supra), “solid nucleic acid lipid particles” (Zimmermann, T S, et al (2006) Nature 441:111-114), cardiolipin (Chien, P Y, et al (2005) Cancer Gene Ther. 12:321-328; Pal, A, et al (2005) Int J. Oncol. 26:1087-1091), polyethyleneimine (Bonnet M E, et al (2008) Pharm. Res. August 16 Epub ahead of print; Aigner, A. (2006) J. Biomed. Biotechnol. 71659), Arg-Gly-Asp (RGD) peptides (Liu, S. (2006) Mol. Pharm. 3:472-487), and polyamidoamines (Tomalia, D A, et al (2007) Biochem. Soc. Trans. 35:61-67; Yoo, H., et al (1999) Pharm. Res. 16:1799-1804). In some embodiments, an iRNA forms a complex with cyclodextrin for systemic administration. Methods for administration and pharmaceutical compositions of iRNAs and cyclodextrins can be found in U.S. Pat. No. 7,427,605, which is herein incorporated by reference in its entirety.

A. Vector Encoded iRNAs of the Invention

[0600] iRNA targeting the PNPLA3 gene can be expressed from transcription units inserted into DNA or RNA vectors (see, e.g., Couture, A, et al., TIG. (1996), 12:5-10; Skillern, A, et al., International PCT Publication No. WO 00/22113, Conrad, International PCT Publication No. WO 00/22114, and Conrad, U.S. Pat. No. 6,054,299). Expression can be transient (on the order of hours to weeks) or sustained (weeks to months or longer), depending upon the specific construct used and the target tissue or cell type. These transgenes can be introduced as a linear construct, a circular plasmid, or a viral vector, which can be an integrating or non-integrating vector. The transgene can also be constructed to permit it to be inherited as an extrachromosomal plasmid (Gassmann, et al., Proc. Natl. Acad. Sci. USA (1995) 92:1292).

[0601] Viral vector systems which can be utilized with the methods and compositions described herein include, but are not limited to, (a) adenovirus vectors; (b) retrovirus vectors, including but not limited to lentiviral vectors, moloney murine leukemia virus, etc.; (c) adeno-associated virus vectors; (d) herpes simplex virus vectors; (e) SV 40 vectors; (f) polyoma virus vectors; (g) papilloma virus vectors; (h) picornavirus vectors; (i) pox virus vectors such as an orthopox, e.g., vaccinia virus vectors or avipox, e.g. canary pox or fowl pox; and (j) a helper-dependent or gutless adenovirus. Replication-defective viruses can also be advantageous. Different vectors will or will not become incorporated into the cells' genome. The constructs can include viral sequences for transfection, if desired. Alternatively, the construct can be incorporated into vectors capable of episomal replication, e.g. EPV and EBV vectors. Constructs for the recombinant expression of an iRNA will generally require regulatory elements, e.g., promoters, enhancers, etc., to ensure the expression of the iRNA in target cells. Other aspects to consider for vectors and constructs are known in the art.

### V. Pharmaceutical Compositions of the Invention

[0602] The present invention also includes pharmaceutical compositions and formulations which include the iRNAs of the invention. In one embodiment, provided herein are pharmaceutical compositions containing an iRNA, as described herein, and a pharmaceutically acceptable carrier. The pharmaceutical compositions containing the iRNA are useful for preventing or treating a PNPLA3-associated disorder, e.g., hypertriglyceridemia. Such pharmaceutical compositions are formulated based on the mode of delivery. One example is compositions that are formulated for systemic administration via parenteral delivery, e.g., by subcutaneous (SC), intramuscular (IM), or intravenous (IV) delivery. The pharmaceutical compositions of the invention may be administered in dosages sufficient to inhibit expression of a PNPLA3 gene.

[0603] In some embodiments, the pharmaceutical compositions of the invention are sterile. In another embodiment, the pharmaceutical compositions of the invention are pyrogen free.

[0604] The pharmaceutical compositions of the invention may be administered in dosages sufficient to inhibit expression of a PNPLA3 gene. In general, a suitable dose of an iRNA of the invention will be in the range of about 0.001 to about 200.0 milligrams per kilogram body weight of the recipient per day, generally in the range of about 1 to 50 mg per kilogram body weight per day. Typically, a suitable dose of an iRNA of the invention will be in the range of about 0.1 mg/kg to about 5.0 mg/kg, preferably about 0.3 mg/kg and about 3.0 mg/kg. A repeat-dose regimen may include administration of a therapeutic amount of iRNA on a regular basis, such as every month, once every 3-6 months, or once a year. In certain embodiments, the iRNA is administered about once per month to about once per six months.

[0605] After an initial treatment regimen, the treatments can be administered on a less frequent basis. Duration of treatment can be determined based on the severity of disease.

[0606] In other embodiments, a single dose of the pharmaceutical compositions can be long lasting, such that doses are administered at not more than 1, 2, 3, or 4 month intervals. In some embodiments of the invention, a single dose of the pharmaceutical compositions of the invention is administered about once per month. In other embodiments of the invention, a single dose of the pharmaceutical compositions of the invention is administered quarterly (i.e., about every three months). In other embodiments of the invention, a single dose of the pharmaceutical compositions of the invention is administered twice per year (i.e., about once every six months).

[0607] The skilled artisan will appreciate that certain factors can influence the dosage and timing required to effectively treat a subject, including but not limited to mutations present in the subject, previous treatments, the general health or age of the subject, and other diseases present. Moreover, treatment of a subject with a prophylactically or therapeutically effective amount, as appropriate, of a composition can include a single treatment or a series of treatments.

[0608] The iRNA can be delivered in a manner to target a particular tissue (e.g., hepatocytes).

[0609] Pharmaceutical compositions of the present invention include, but are not limited to, solutions, emulsions, and liposome-containing formulations. These compositions can be generated from a variety of components that include, but are not limited to, preformed liquids, self-emulsifying solids, and self-emulsifying semisolids. Formulations include those that target the liver.

[0610] The pharmaceutical formulations of the present invention, which can conveniently be presented in unit dosage form, can be prepared according to conventional techniques well known in the pharmaceutical industry. Such techniques include the step of bringing into association the active ingredients with the pharmaceutical carrier(s) or excipient(s). In general, the formulations are prepared by uniformly and intimately bringing into association the active ingredients with liquid carriers.

### A. Additional Formulations

i. Emulsions

[0611] The compositions of the present invention can be prepared and formulated as emulsions. Emulsions are typically heterogeneous systems of one liquid dispersed in another in the form of droplets usually exceeding 0.1 μm in diameter (see e.g., Ansel's Pharmaceutical Dosage Forms and Drug Delivery Systems, Allen, L V., Popovich N G., and Ansel H C., 2004, Lippincott Williams & Wilkins (8th ed.), New York, NY; Idson, in Pharmaceutical Dosage Forms, Lieberman, Rieger and Banker (Eds.), 1988, Marcel Dekker, Inc., New York, N.Y., volume 1, p. 199; Rosoff, in Pharmaceutical Dosage Forms, Lieberman, Rieger and Banker (Eds.), 1988, Marcel Dekker, Inc., New York, N.Y., Volume 1, p. 245; Block in Pharmaceutical Dosage Forms, Lieberman, Rieger and Banker (Eds.), 1988, Marcel Dekker, Inc., New York, N.Y., volume 2, p. 335; Higuchi et al., in Remington's Pharmaceutical Sciences, Mack Publishing Co., Easton, Pa., 1985, p. 301). Emulsions are often biphasic systems comprising two immiscible liquid phases intimately mixed and dispersed with each other. In general, emulsions can be of either the water-in-oil (w/o) or the oil-in-water (o/w) variety. When an aqueous phase is finely divided into and dispersed as minute droplets into a bulk oily phase, the resulting composition is called a water-in-oil (w/o) emulsion. Alternatively, when an oily phase is finely divided into and dispersed as minute droplets into a bulk aqueous phase, the resulting composition is called an oil-in-water (o/w) emulsion. Emulsions can contain additional components in addition to the dispersed phases, and the active drug which can be present as a solution either in the aqueous phase, oily phase or itself as a separate phase. Pharmaceutical excipients such as emulsifiers, stabilizers, dyes, and anti-oxidants can also be present in emulsions as needed. Pharmaceutical emulsions can also be multiple emulsions that are comprised of more than two phases such as, for example, in the case of oil-in-water-in-oil (o/w/o) and water-in-oil-in-water (w/o/w) emulsions. Such complex formulations often provide certain advantages that simple binary emulsions do not. Multiple emulsions in which individual oil droplets of an o/w emulsion enclose small water droplets constitute a w/o/w emulsion. Likewise a system of oil droplets enclosed in globules of water stabilized in an oily continuous phase provides an o/w/o emulsion.

[0612] Emulsions are characterized by little or no thermodynamic stability. Often, the dispersed or discontinuous phase of the emulsion is well dispersed into the external or continuous phase and maintained in this form through the means of emulsifiers or the viscosity of the formulation. Other means of stabilizing emulsions entail the use of emulsifiers that can be incorporated into either phase of the emulsion. Emulsifiers can broadly be classified into four categories: synthetic surfactants, naturally occurring emulsifiers, absorption bases, and finely dispersed solids (see e.g., Ansel's Pharmaceutical Dosage Forms and Drug Delivery Systems, Allen, L V., Popovich N G., and Ansel H C., 2004, Lippincott Williams & Wilkins (8th ed.), New York, NY; Idson, in Pharmaceutical Dosage Forms, Lieberman, Rieger and Banker (Eds.), 1988, Marcel Dekker, Inc., New York, N.Y., volume 1, p. 199).

[0613] Synthetic surfactants, also known as surface active agents, have found wide applicability in the formulation of emulsions and have been reviewed in the literature (see e.g., Ansel's Pharmaceutical Dosage Forms and Drug Delivery Systems, Allen, L V., Popovich N G., and Ansel H C., 2004, Lippincott Williams & Wilkins (8th ed.), New York, NY; Rieger, in Pharmaceutical Dosage Forms, Lieberman, Rieger and Banker (Eds.), 1988, Marcel Dekker, Inc., New York, N.Y., volume 1, p. 285; Idson, in Pharmaceutical Dosage Forms, Lieberman, Rieger and Banker (Eds.), Marcel Dekker, Inc., New York, N.Y., 1988, volume 1, p. 199). Surfactants are typically amphiphilic and comprise a hydrophilic and a hydrophobic portion. The ratio of the hydrophilic to the hydrophobic nature of the surfactant has been termed the hydrophile/lipophile balance (HLB) and is a valuable tool in categorizing and selecting surfactants in the preparation of formulations. Surfactants can be classified into different classes based on the nature of the hydrophilic group: nonionic, anionic, cationic, and amphoteric (see e.g., Ansel's Pharmaceutical Dosage Forms and Drug Delivery Systems, Allen, L V., Popovich N G., and Ansel H C., 2004, Lippincott Williams & Wilkins (8th ed.), New York, NY Rieger, in Pharmaceutical Dosage Forms, Lieberman, Rieger and Banker (Eds.), 1988, Marcel Dekker, Inc., New York, N.Y., volume 1, p. 285).

[0614] A large variety of non-emulsifying materials are also included in emulsion formulations and contribute to the properties of emulsions. These include fats, oils, waxes, fatty acids, fatty alcohols, fatty esters, humectants, hydrophilic colloids, preservatives, and antioxidants (Block, in Pharmaceutical Dosage Forms, Lieberman, Rieger and Banker (Eds.), 1988, Marcel Dekker, Inc., New York, N.Y., volume 1, p. 335; Idson, in Pharmaceutical Dosage Forms, Lieberman, Rieger and Banker (Eds.), 1988, Marcel Dekker, Inc., New York, N.Y., volume 1, p. 199).

[0615] The application of emulsion formulations via dermatological, oral, and parenteral routes, and methods for their manufacture have been reviewed in the literature (see e.g., Ansel's Pharmaceutical Dosage Forms and Drug Delivery Systems, Allen, L V., Popovich N G., and Ansel H C., 2004, Lippincott Williams & Wilkins (8th ed.), New York, NY; Idson, in Pharmaceutical Dosage Forms, Lieberman, Rieger and Banker (Eds.), 1988, Marcel Dekker, Inc., New York, N.Y., volume 1, p. 199).

ii. Microemulsions

[0616] In one embodiment of the present invention, the compositions of iRNAs and nucleic acids are formulated as microemulsions. A microemulsion can be defined as a system of water, oil, and amphiphile which is a single optically isotropic and thermodynamically stable liquid solution (see e.g., Ansel's Pharmaceutical Dosage Forms and Drug Delivery Systems, Allen, L V., Popovich N G., and Ansel H C., 2004, Lippincott Williams & Wilkins (8th ed.), New York, NY; Rosoff, in Pharmaceutical Dosage Forms, Lieberman, Rieger and Banker (Eds.), 1988, Marcel Dekker, Inc., New York, N.Y., volume 1, p. 245). Typically microemulsions are systems that are prepared by first dispersing an oil in an aqueous surfactant solution and then adding a sufficient amount of a fourth component, generally an intermediate chain-length alcohol to form a transparent system. Therefore, microemulsions have also been described as thermodynamically stable, isotropically clear dispersions of two immiscible liquids that are stabilized by interfacial films of surface-active molecules (Leung and Shah, in: Controlled Release of Drugs: Polymers and Aggregate Systems, Rosoff, M., Ed., 1989, VCH Publishers, New York, pages 185-215).

iii. Microparticles

[0617] An iRNA of the invention may be incorporated into a particle, e.g., a microparticle. Microparticles can be produced by spray-drying, but may also be produced by other methods including lyophilization, evaporation, fluid bed drying, vacuum drying, or a combination of these techniques.

iv. Penetration Enhancers

[0618] In one embodiment, the present invention employs various penetration enhancers to effect the efficient delivery of nucleic acids, particularly iRNAs, to the skin of animals. Most drugs are present in solution in both ionized and nonionized forms. However, usually only lipid soluble or lipophilic drugs readily cross cell membranes. It has been discovered that even non-lipophilic drugs can cross cell membranes if the membrane to be crossed is treated with a penetration enhancer. In addition to aiding the diffusion of non-lipophilic drugs across cell membranes, penetration enhancers also enhance the permeability of lipophilic drugs.

[0619] Penetration enhancers can be classified as belonging to one of five broad categories, i.e., surfactants, fatty acids, bile salts, chelating agents, and non-chelating non-surfactants (see e.g., Malmsten, M. Surfactants and polymers in drug delivery, Informa Health Care, New York, NY, 2002; Lee et al., Critical Reviews in Therapeutic Drug Carrier Systems, 1991, p. 92). Each of the above mentioned classes of penetration enhancers and their use in manufacture of pharmaceutical compositions and delivery of pharmaceutical agents are well known in the art.

v. Excipients

[0620] In contrast to a carrier compound, a “pharmaceutical carrier” or “excipient” is a pharmaceutically acceptable solvent, suspending agent, or any other pharmacologically inert vehicle for delivering one or more nucleic acids to an animal. The excipient can be liquid or solid and is selected, with the planned manner of administration in mind, so as to provide for the desired bulk, consistency, etc., when combined with a nucleic acid and the other components of a given pharmaceutical composition. Such agent are well known in the art.

vi. Other Components

[0621] The compositions of the present invention can additionally contain other adjunct components conventionally found in pharmaceutical compositions, at their art-established usage levels. Thus, for example, the compositions can contain additional, compatible, pharmaceutically-active materials such as, for example, antipruritics, astringents, local anesthetics or anti-inflammatory agents, or can contain additional materials useful in physically formulating various dosage forms of the compositions of the present invention, such as dyes, flavoring agents, preservatives, antioxidants, opacifiers, thickening agents and stabilizers. However, such materials, when added, should not unduly interfere with the biological activities of the components of the compositions of the present invention. The formulations can be sterilized and, if desired, mixed with auxiliary agents, e.g., lubricants, preservatives, stabilizers, wetting agents, emulsifiers, salts for influencing osmotic pressure, buffers, colorings, flavorings, or aromatic substances, and the like which do not deleteriously interact with the nucleic acid(s) of the formulation.

[0622] Aqueous suspensions can contain substances which increase the viscosity of the suspension including, for example, sodium carboxymethylcellulose, sorbitol, or dextran. The suspension can also contain stabilizers.

[0623] In some embodiments, pharmaceutical compositions featured in the invention include (a) one or more iRNA and (b) one or more agents which function by a non-iRNA mechanism and which are useful in treating a PNPLA33-associated disorder, e.g., NAFLD.

[0624] Toxicity and prophylactic efficacy of such compounds can be determined by standard pharmaceutical procedures in cell cultures or experimental animals, e.g., for determining the LD50 (the dose lethal to 50% of the population) and the ED50 (the dose prophylactically effective in 50% of the population). The dose ratio between toxic and therapeutic effects is the therapeutic index and it can be expressed as the ratio LD50/ED50. Compounds that exhibit high therapeutic indices are preferred.

[0625] The data obtained from cell culture assays and animal studies can be used in formulating a range of dosage for use in humans. The dosage of compositions featured herein in the invention lies generally within a range of circulating concentrations that include the ED50, preferably an ED80 or ED90, with little or no toxicity. The dosage can vary within this range depending upon the dosage form employed and the route of administration utilized. For any compound used in the methods featured in the invention, the prophylactically effective dose can be estimated initially from cell culture assays. A dose can be formulated in animal models to achieve a circulating plasma concentration range of the compound or, when appropriate, of the polypeptide product of a target sequence (e.g., achieving a decreased concentration of the polypeptide) that includes the IC50 (i.e., the concentration of the test compound which achieves a half-maximal inhibition of symptoms) or higher levels of inhibition as determined in cell culture. Such information can be used to more accurately determine useful doses in humans. Levels in plasma can be measured, for example, by high performance liquid chromatography.

[0626] In addition to their administration, as discussed above, the iRNAs featured in the invention can be administered in combination with other known agents used for the prevention or treatment of aPNPLA3-associated disorder, e.g., NAFLD. In any event, the administering physician can adjust the amount and timing of iRNA administration on the basis of results observed using standard measures of efficacy known in the art or described herein.

### VI. Methods for Inhibiting PNPLA3 Expression

[0627] The present invention also provides methods of inhibiting expression of a PNPLA3 gene in a cell. The methods include contacting a cell with an RNAi agent, e.g., double stranded RNA agent, in an amount effective to inhibit expression of PNPLA3 in the cell, thereby inhibiting expression of PNPLA3 in the cell.

[0628] Contacting of a cell with an iRNA, e.g., a double stranded RNA agent, may be done in vitro or in vivo. Contacting a cell in vivo with the iRNA includes contacting a cell or group of cells within a subject, e.g., a human subject, with the iRNA. Combinations of in vitro and in vivo methods of contacting a cell are also possible. Contacting a cell may be direct or indirect, as discussed above. Furthermore, contacting a cell may be accomplished via a targeting ligand, including any ligand described herein or known in the art. In preferred embodiments, the targeting ligand is a carbohydrate moiety, e.g., a GalNAc₃ ligand, or any other ligand that directs the RNAi agent to a site of interest.

[0629] The term “inhibiting,” as used herein, is used interchangeably with “reducing,” “silencing,” “downregulating”, “suppressing”, and other similar terms, and includes any level of inhibition.

[0630] The phrase “inhibiting expression of a PNPLA3” is intended to refer to inhibition of expression of any PNPLA3 gene (such as, e.g., a mouse PNPLA3 3 gene, a rat PNPLA3 gene, a monkey PNPLA3 gene, or a human PNPLA3 gene) as well as variants or mutants of a PNPLA3 gene. Thus, the PNPLA3 gene may be a wild-type PNPLA3 gene, a mutant PNPLA3 gene, or a transgenic PNPLA3 gene in the context of a genetically manipulated cell, group of cells, or organism.

[0631] “Inhibiting expression of a PNPLA3 gene” includes any level of inhibition of aPNPLA3 gene, e.g., at least partial suppression of the expression of a PNPLA3 gene. The expression of the PNPLA3 gene may be assessed based on the level, or the change in the level, of any variable associated with PNPLA3 gene expression, e.g., PNPLA3 mRNA level or PNPLA3 protein level. This level may be assessed in an individual cell or in a group of cells, including, for example, a sample derived from a subject. It is understood that PNPLA3 is expressed predominantly in the liver, but also in the brain, gall bladder, heart, and kidney, and is present in circulation.

[0632] Inhibition may be assessed by a decrease in an absolute or relative level of one or more variables that are associated with PNPLA3 expression compared with a control level. The control level may be any type of control level that is utilized in the art, e.g., a pre-dose baseline level, or a level determined from a similar subject, cell, or sample that is untreated or treated with a control (such as, e.g., buffer only control or inactive agent control).

[0633] In some embodiments of the methods of the invention, expression of a PNPLA3 gene is inhibited by at least 50%, 55%, 60%, 65%, 70%, 75%, 80%, 85%, 90%, or 95%, or to below the level of detection of the assay. In preferred embodiments, expression of a PNPLA3 gene is inhibited by at least 70%. It is further understood that inhibition of PNPLA3 expression in certain tissues, e.g., in liver, without a significant inhibition of expression in other tissues, e.g., brain, may be desirable. In preferred embodiments, expression level is determined using the assay method provided in Example 2 with a 10 nM siRNA concentration in the appropriate species matched cell line.

[0634] In certain embodiments, inhibition of expression in vivo is determined by knockdown of the human gene in a rodent expressing the human gene, e.g., an AAV-infected mouse expressing the human target gene (i.e., PNPLA3), e.g., when administered as a single dose, e.g., at 3 mg/kg at the nadir of RNA expression. Knockdown of expression of an endogenous gene in a model animal system can also be determined, e.g., after administration of a single dose at, e.g., 3 mg/kg at the nadir of RNA expression. Such systems are useful when the nucleic acid sequence of the human gene and the model animal gene are sufficiently close such that the human iRNA provides effective knockdown of the model animal gene. RNA expression in liver is determined using the PCR methods provided in Example 2.

[0635] Inhibition of the expression of a PNPLA3 gene may be manifested by a reduction of the amount of mRNA expressed by a first cell or group of cells (such cells may be present, for example, in a sample derived from a subject) in which a PNPLA3 gene is transcribed and which has or have been treated (e.g., by contacting the cell or cells with an iRNA of the invention, or by administering an iRNA of the invention to a subject in which the cells are or were present) such that the expression of a PNPLA3 gene is inhibited, as compared to a second cell or group of cells substantially identical to the first cell or group of cells but which has not or have not been so treated (control cell(s) not treated with an iRNA or not treated with an iRNA targeted to the gene of interest). In preferred embodiments, the inhibition is assessed by the method provided in Example 2 using a 10 nM siRNA concentration in the species matched cell line and expressing the level of mRNA in treated cells as a percentage of the level of mRNA in control cells, using the following formula:

$$\frac{( mRNA in control cells ) - ( mRNA in treated cells )}{( mRNA in control cells )} •100 \%$$

[0636] In other embodiments, inhibition of the expression of a PNPLA3 gene may be assessed in terms of a reduction of a parameter that is functionally linked to PNPLA3 gene expression, e.g., PNPLA3 protein level in blood or serum from a subject. PNPLA3 gene silencing may be determined in any cell expressing PNPLA3, either endogenous or heterologous from an expression construct, and by any assay known in the art.

[0637] Inhibition of the expression of a PNPLA3 protein may be manifested by a reduction in the level of the PNPLA3 protein that is expressed by a cell or group of cells or in a subject sample (e.g., the level of protein in a blood sample derived from a subject). As explained above, for the assessment of mRNA suppression, the inhibition of protein expression levels in a treated cell or group of cells may similarly be expressed as a percentage of the level of protein in a control cell or group of cells, or the change in the level of protein in a subject sample, e.g., blood or serum derived therefrom.

[0638] A control cell, a group of cells, or subject sample that may be used to assess the inhibition of the expression of a PNPLA3 gene includes a cell, group of cells, or subject sample that has not yet been contacted with an RNAi agent of the invention. For example, the control cell, group of cells, or subject sample may be derived from an individual subject (e.g., a human or animal subject) prior to treatment of the subject with an RNAi agent or an appropriately matched population control.

[0639] The level of PNPLA3 mRNA that is expressed by a cell or group of cells may be determined using any method known in the art for assessing mRNA expression. In one embodiment, the level of expression of PNPLA3 in a sample is determined by detecting a transcribed polynucleotide, or portion thereof, e.g., mRNA of the PNPLA3 gene. RNA may be extracted from cells using RNA extraction techniques including, for example, using acid phenol/guanidine isothiocyanate extraction (RNAzol B; Biogenesis), RNeasy™ RNA preparation kits (Qiagen®) or PAXgene™ (PreAnalytix™, Switzerland). Typical assay formats utilizing ribonucleic acid hybridization include nuclear run-on assays, RT-PCR, RNase protection assays, northern blotting, in situ hybridization, and microarray analysis.

[0640] In some embodiments, the level of expression of PNPLA3 is determined using a nucleic acid probe. The term “probe”, as used herein, refers to any molecule that is capable of selectively binding to a specific PNPLA3. Probes can be synthesized by one of skill in the art, or derived from appropriate biological preparations. Probes may be specifically designed to be labeled. Examples of molecules that can be utilized as probes include, but are not limited to, RNA, DNA, proteins, antibodies, and organic molecules.

[0641] Isolated mRNA can be used in hybridization or amplification assays that include, but are not limited to, Southern or northern analyses, polymerase chain reaction (PCR) analyses and probe arrays. One method for the determination of mRNA levels involves contacting the isolated mRNA with a nucleic acid molecule (probe) that can hybridize to PNPLA3 mRNA. In one embodiment, the mRNA is immobilized on a solid surface and contacted with a probe, for example by running the isolated mRNA on an agarose gel and transferring the mRNA from the gel to a membrane, such as nitrocellulose. In an alternative embodiment, the probe(s) are immobilized on a solid surface and the mRNA is contacted with the probe(s), for example, in an Affymetrix® gene chip array. A skilled artisan can readily adapt known mRNA detection methods for use in determining the level of PNPLA3 mRNA.

[0642] An alternative method for determining the level of expression of PNPLA3 in a sample involves the process of nucleic acid amplification or reverse transcriptase (to prepare cDNA) of for example mRNA in the sample, e.g., by RT-PCR (the experimental embodiment set forth in Mullis, 1987, U.S. Pat. No. 4,683,202), ligase chain reaction (Barany (1991) Proc. Natl. Acad. Sci. USA 88:189-193), self sustained sequence replication (Guatelli et al. (1990) Proc. Natl. Acad. Sci. USA 87:1874-1878), transcriptional amplification system (Kwoh et al. (1989) Proc. Natl. Acad. Sci. USA 86:1173-1177), Q-Beta Replicase (Lizardi et al. (1988) Bio/Technology 6:1197), rolling circle replication (Lizardi et al., U.S. Pat. No. 5,854,033) or any other nucleic acid amplification method, followed by the detection of the amplified molecules using techniques well known to those of skill in the art. These detection schemes are especially useful for the detection of nucleic acid molecules if such molecules are present in very low numbers. In particular aspects of the invention, the level of expression of PNPLA3 is determined by quantitative fluorogenic RT-PCR (i.e., the TaqMan™ System). In preferred embodiments, expression level is determined by the method provided in Example 2 using, e.g., a 10 nM siRNA concentration, in the species matched cell line.

[0643] The expression levels of PNPLA3 mRNA may be monitored using a membrane blot (such as used in hybridization analysis such as northern, Southern, dot, and the like), or microwells, sample tubes, gels, beads or fibers (or any solid support comprising bound nucleic acids). See U.S. Pat. Nos. 5,770,722, 5,874,219, 5,744,305, 5,677,195 and 5,445,934, which are incorporated herein by reference. The determination of PNPLA3 expression level may also comprise using nucleic acid probes in solution.

[0644] In preferred embodiments, the level of mRNA expression is assessed using branched DNA (bDNA) assays or real time PCR (qPCR). The use of these methods is described and exemplified in the Examples presented herein. In preferred embodiments, expression level is determined by the method provided in Example 2 using a 10 nM siRNA concentration in the species matched cell line.

[0645] The level of PNPLA3 protein expression may be determined using any method known in the art for the measurement of protein levels. Such methods include, for example, electrophoresis, capillary electrophoresis, high performance liquid chromatography (HPLC), thin layer chromatography (TLC), hyperdiffusion chromatography, fluid or gel precipitin reactions, absorption spectroscopy, a colorimetric assays, spectrophotometric assays, flow cytometry, immunodiffusion (single or double), immunoelectrophoresis, western blotting, radioimmunoassay (RIA), enzyme-linked immunosorbent assays (ELISAs), immunofluorescent assays, electrochemiluminescence assays, and the like.

[0646] In some embodiments, the efficacy of the methods of the invention are assessed by a decrease in PNPLA3 mRNA or protein level (e.g., in a liver biopsy).

[0647] In some embodiments of the methods of the invention, the iRNA is administered to a subject such that the iRNA is delivered to a specific site within the subject. The inhibition of expression of PNPLA3 may be assessed using measurements of the level or change in the level of PNPLA3 mRNA or PNPLA3 protein in a sample derived from fluid or tissue from the specific site within the subject (e.g., liver or blood).

[0648] As used herein, the terms detecting or determining a level of an analyte are understood to mean performing the steps to determine if a material, e.g., protein, RNA, is present. As used herein, methods of detecting or determining include detection or determination of an analyte level that is below the level of detection for the method used.

### VII. Prophylactic and Treatment Methods of the Invention

[0649] The present invention also provides methods of using an iRNA of the invention or a composition containing an iRNA of the invention to inhibit expression of PNPLA3, thereby preventing or treating an PNPLA3-associated disorder, e.g., fatty liver (steatosis), nonalcoholic steatohepatitis (NASH), cirrhosis of the liver, accumulation of fat in the liver, inflammation of the liver, hepatocellular necrosis, liver fibrosis, obesity, or nonalcoholic fatty liver disease (NAFLD). In the methods of the invention the cell may be contacted with the siRNA in vitro or in vivo, i.e., the cell may be within a subject.

[0650] A cell suitable for treatment using the methods of the invention may be any cell that expresses an PNPLA3 gene, e.g., a liver cell, a brain cell, a gall bladder cell, a heart cell, or a kidney cell, but preferably a liver cell. A cell suitable for use in the methods of the invention may be a mammalian cell, e.g., a primate cell (such as a human cell, including human cell in a chimeric non-human animal, or a non-human primate cell, e.g., a monkey cell or a chimpanzee cell), or a non-primate cell. In certain embodiments, the cell is a human cell, e.g., a human liver cell. In the methods of the invention, PNPLA3 expression is inhibited in the cell by at least 50, 55, 60, 65, 70, 75, 80, 85, 90, or 95, or to a level below the level of detection of the assay.

[0651] The in vivo methods of the invention may include administering to a subject a composition containing an iRNA, where the iRNA includes a nucleotide sequence that is complementary to at least a part of an RNA transcript of the PNPLA3 gene of the mammal to which the RNAi agent is to be administered. The composition can be administered by any means known in the art including, but not limited to oral, intraperitoneal, or parenteral routes, including intracranial (e.g., intraventricular, intraparenchymal, and intrathecal), intravenous, intramuscular, subcutaneous, transdermal, airway (aerosol), nasal, rectal, and topical (including buccal and sublingual) administration. In certain embodiments, the compositions are administered by intravenous infusion or injection. In certain embodiments, the compositions are administered by subcutaneous injection. In certain embodiments, the compositions are administered by intramuscular injection.

[0652] In one aspect, the present invention also provides methods for inhibiting the expression of an PNPLA3 gene in a mammal. The methods include administering to the mammal a composition comprising a dsRNA that targets a PNPLA3 gene in a cell of the mammal and maintaining the mammal for a time sufficient to obtain degradation of the mRNA transcript of the PNPLA3 gene, thereby inhibiting expression of the PNPLA3 gene in the cell. Reduction in gene expression can be assessed by any methods known in the art and by methods, e.g. qRT-PCR, described herein, e.g., in Example 2. Reduction in protein production can be assessed by any methods known it the art, e.g. ELISA. In certain embodiments, a puncture liver biopsy sample serves as the tissue material for monitoring the reduction in the PNPLA3 gene or protein expression. In other embodiments, a blood sample serves as the subject sample for monitoring the reduction in the PNPLA3 protein expression.

[0653] The present invention further provides methods of treatment in a subject in need thereof, e.g., a subject diagnosed with a PNPLA3-associated disorder, such as, fatty liver (steatosis), nonalcoholic steatohepatitis (NASH), cirrhosis of the liver, accumulation of fat in the liver, inflammation of the liver, hepatocellular necrosis, liver fibrosis, obesity, or nonalcoholic fatty liver disease (NAFLD).

[0654] The present invention further provides methods of prophylaxis in a subject in need thereof. The treatment methods of the invention include administering an iRNA of the invention to a subject, e.g., a subject that would benefit from a reduction of PNPLA3 expression, in a prophylactically effective amount of an iRNA targeting a PNPLA3 gene or a pharmaceutical composition comprising an iRNA targeting a PNPLA3 gene.

[0655] In one aspect, the present invention provides methods of treating a subject having a disorder that would benefit from reduction in PNPLA3 expression, e.g., a PNPLA3-associated disease, such as a chronic fibro-inflammatory liver disease (e.g., cancer, e.g., hepatocellular carcinoma, nonalcoholic steatohepatitis (NASH), cirrhosis of the liver, inflammation of the liver, hepatocellular necrosis, liver fibrosis, and nonalcoholic fatty liver disease (NAFLD). In one embodiment, the chronic fibro-inflammatory liver disease is NASH.

[0656] In one embodiment, a PNPLA3-associated disease is selected from the group consisting of fatty liver (steatosis), nonalcoholic steatohepatitis (NASH), cirrhosis of the liver, accumulation of fat in the liver, inflammation of the liver, hepatocellular necrosis, liver fibrosis, obesity, or nonalcoholic fatty liver disease (NAFLD).

[0657] As used herein, “nonalcoholic fatty liver disease,” used interchangeably with the term “NAFLD,” refers to a disease defined by the presence of macrovascular steatosis in the presence of less than 20 gm of alcohol ingestion per day. NAFLD is the most common liver disease in the United States, and is commonly associated with insulin resistance/type 2 diabetes mellitus and obesity. NAFLD is manifested by steatosis, steatohepatitis, cirrhosis, and sometimes hepatocellaular carcinoma. For a review of NAFLD, see Tolman and Dalpiaz (2007) Ther. Clin. Risk. Manag., 3(6):1153-1163 the entire contents of which are incorporated herein by reference.

[0658] As used herein, the terms “steatosis,” “hepatic steatosis,” and “fatty liver disease” refer to the accumulation of triglycerides and other fats in the liver cells.

[0659] As used herein, the term “Nonalcoholic steatohepatitis” or “NASH” refers to liver inflammation and damage caused by a buildup of fat in the liver. NASH is part of a group of conditions called nonalcoholic fatty liver disease (NAFLD). NASH resembles alcoholic liver disease, but occurs in people who drink little or no alcohol. The major feature in NASH is fat in the liver, along with inflammation and damage. Most people with NASH feel well and are not aware that they have a liver problem. Nevertheless, NASH can be severe and can lead to cirrhosis, in which the liver is permanently damaged and scarred and no longer able to work properly. NASH is usually first suspected in a person who is found to have elevations in liver tests that are included in routine blood test panels, such as alanine aminotransferase (ALT) or aspartate aminotransferase (AST). When further evaluation shows no apparent reason for liver disease (such as medications, viral hepatitis, or excessive use of alcohol) and when x rays or imaging studies of the liver show fat, NASH is suspected. The only means of proving a diagnosis of NASH and separating it from simple fatty liver is a liver biopsy.

[0660] As used herein, the term “cirrhosis,” defined histologically, is a diffuse hepatic process characterized by fibrosis and conversion of the normal liver architecture into structurally abnormal nodules.

[0661] An iRNA of the invention may be administered as a “free iRNA.” A free iRNA is administered in the absence of a pharmaceutical composition. The naked iRNA may be in a suitable buffer solution. The buffer solution may comprise acetate, citrate, prolamine, carbonate, or phosphate, or any combination thereof. In one embodiment, the buffer solution is phosphate buffered saline (PBS). The pH and osmolarity of the buffer solution containing the iRNA can be adjusted such that it is suitable for administering to a subject.

[0662] Alternatively, an iRNA of the invention may be administered as a pharmaceutical composition, such as a dsRNA liposomal formulation.

[0663] Subjects that would benefit from an inhibition of PNPLA3 gene expression are subjects susceptible to or diagnosed with an PNPLA3-associated disorder, such as fatty liver (steatosis), nonalcoholic steatohepatitis (NASH), cirrhosis of the liver, accumulation of fat in the liver, inflammation of the liver, hepatocellular necrosis, liver fibrosis, obesity, or nonalcoholic fatty liver disease (NAFLD).

[0664] In an embodiment, the method includes administering a composition featured herein such that expression of the target a PNPLA3 gene is decreased, such as for about 1, 2, 3, 4, 5, 6, 1-6, 1-3, or 3-6 months per dose. In certain embodiments, the composition is administered once every 3-6 months.

[0665] Preferably, the iRNAs useful for the methods and compositions featured herein specifically target RNAs (primary or processed) of the target a PNPLA3 gene. Compositions and methods for inhibiting the expression of these genes using iRNAs can be prepared and performed as described herein.

[0666] Administration of the iRNA according to the methods of the invention may result prevention or treatment of a PNPLA3-associated disorder, e.g., fatty liver (steatosis), nonalcoholic steatohepatitis (NASH), cirrhosis of the liver, accumulation of fat in the liver, inflammation of the liver, hepatocellular necrosis, liver fibrosis, obesity, or nonalcoholic fatty liver disease (NAFLD).

[0667] Subjects can be administered a therapeutic amount of iRNA, such as about 0.01 mg/kg to about 200 mg/kg.

[0668] The iRNA is preferably administered subcutaneously, i.e., by subcutaneous injection. One or more injections may be used to deliver the desired dose of iRNA to a subject. The injections may be repeated over a period of time.

[0669] The administration may be repeated on a regular basis. In certain embodiments, after an initial treatment regimen, the treatments can be administered on a less frequent basis. A repeat-dose regimen may include administration of a therapeutic amount of iRNA on a regular basis, such as once per month to once a year. In certain embodiments, the iRNA is administered about once per month to about once every three months, or about once every three months to about once every six months.

[0670] The invention further provides methods and uses of an iRNA agent or a pharmaceutical composition thereof for treating a subject that would benefit from reduction and/or inhibition of PNPLA3 gene expression, e.g., a subject having an PNPLA3-associated disease, in combination with other pharmaceuticals and/or other therapeutic methods, e.g., with known pharmaceuticals and/or known therapeutic methods, such as, for example, those which are currently employed for treating these disorders.

[0671] Accordingly, in some aspects of the invention, the methods which include either a single iRNA agent of the invention, further include administering to the subject one or more additional therapeutic agents.

[0672] The iRNA agent and an additional therapeutic agent and/or treatment may be administered at the same time and/or in the same combination, e.g., parenterally, or the additional therapeutic agent can be administered as part of a separate composition or at separate times and/or by another method known in the art or described herein.

[0673] Examples of additional therapeutic agents include those known to treat hypertriglyceridemia and other diseases that are caused by, associated with, or are a consequence of, hypertriglyceridemia. For example, an iRNA featured in the invention can be administered with any such additional therapeutic agents. Examples of such agents include, but are not limited to an HMG-CoA reductase inhibitor (e.g., a statin), a fibrate, a bile acid sequestrant, niacin, an antiplatelet agent, an angiotensin converting enzyme inhibitor, an angiotensin II receptor antagonist (e.g., losartan potassium, such as Merck & Co.'s Cozaar®), an acylCoA cholesterol acetyltransferase (ACAT) inhibitor, a cholesterol absorption inhibitor, a cholesterol ester transfer protein (CETP) inhibitor, a microsomal triglyceride transfer protein (MTTP) inhibitor, a cholesterol modulator, a bile acid modulator, a peroxisome proliferation activated receptor (PPAR) agonist, a gene-based therapy, a composite vascular protectant (e.g., AGI-1067, from Atherogenics), a glycoprotein Ilb/IIIa inhibitor, aspirin or an aspirin-like compound, an IBAT inhibitor (e.g., S-8921, from Shionogi), a squalene synthase inhibitor, a monocyte chemoattractant protein (MCP)-I inhibitor, or fish oil. Exemplary HMG-CoA reductase inhibitors include atorvastatin (Pfizer's Lipitor®/Tahor/Sortis/Torvast/Cardyl), pravastatin (Bristol-Myers Squibb's Pravachol, Sankyo's Mevalotin/Sanaprav), simvastatin (Merck's Zocor®/Sinvacor, Boehringer Ingelheim's Denan, Banyu's Lipovas), lovastatin (Merck's Mevacor/Mevinacor, Bexal's Lovastatina, Cepa; Schwarz Pharma's Liposcler), fluvastatin (Novartis' Lescol®/Locol/Lochol, Fujisawa's Cranoc, Solvay's Digaril), cerivastatin (Bayer's Lipobay/GlaxoSmithKline's Baycol), rosuvastatin (AstraZeneca's Crestor®), and pitivastatin (itavastatin/risivastatin) (Nissan Chemical, Kowa Kogyo, Sankyo, and Novartis). Exemplary fibrates include, e.g., bezafibrate (e.g., Roche's Befizal®/Cedur®/Bezalip®, Kissei's Bezatol), clofibrate (e.g., Wyeth's Atromid-S®), fenofibrate (e.g., Fournier's Lipidil/Lipantil, Abbott's Tricor®, Takeda's Lipantil, generics), gemfibrozil (e.g., Pfizer's Lopid/Lipur) and ciprofibrate (Sanofi-Synthelabo's Modalim®). Exemplary bile acid sequestrants include, e.g., cholestyramine (Bristol-Myers Squibb's Questran® and Questran Light™) colestipol (e.g., Pharmacia's Colestid), and colesevelam (Genzyme/Sankyo's WelChol™). Exemplary niacin therapies include, e.g., immediate release formulations, such as Aventis' Nicobid, Upsher-Smith's Niacor, Aventis' Nicolar, and Sanwakagaku's Perycit. Niacin extended release formulations include, e.g., Kos Pharmaceuticals' Niaspan and Upsher-Smith's SIo-Niacin. Exemplary antiplatelet agents include, e.g., aspirin (e.g., Bayer's aspirin), clopidogrel (Sanofi-Synthelabo/Bristol-Myers Squibb's Plavix), and ticlopidine (e.g., Sanofi-Synthelabo's Ticlid and Daiichi's Panaldine). Other aspirin-like compounds useful in combination with a dsRNA targeting PNPLA3 include, e.g., Asacard (slow-release aspirin, by Pharmacia) and Pamicogrel (Kanebo/Angelini Ricerche/CEPA). Exemplary angiotensin-converting enzyme inhibitors include, e.g., ramipril (e.g., Aventis' Altace) and enalapril (e.g., Merck & Co.'s Vasotec). Exemplary acyl CoA cholesterol acetyltransferase (AC AT) inhibitors include, e.g., avasimibe (Pfizer), eflucimibe (BioMsrieux Pierre Fabre/Eli Lilly), CS-505 (Sankyo and Kyoto), and SMP-797 (Sumito). Exemplary cholesterol absorption inhibitors include, e.g., ezetimibe (Merck/Schering-Plough Pharmaceuticals Zetia®) and Pamaqueside (Pfizer). Exemplary CETP inhibitors include, e.g., Torcetrapib (also called CP-529414, Pfizer), JTT-705 (Japan Tobacco), and CETi-I (Avant Immunotherapeutics). Exemplary microsomal triglyceride transfer protein (MTTP) inhibitors include, e.g., implitapide (Bayer), R-103757 (Janssen), and CP-346086 (Pfizer). Other exemplary cholesterol modulators include, e.g., NO-1886 (Otsuka/TAP Pharmaceutical), CI-1027 (Pfizer), and WAY-135433 (Wyeth-Ayerst).

[0674] Exemplary bile acid modulators include, e.g., HBS-107 (Hisamitsu/Banyu), Btg-511 (British Technology Group), BARI-1453 (Aventis), 5-8921 (Shionogi), SD-5613 (Pfizer), and AZD-7806 (AstraZeneca). Exemplary peroxisome proliferation activated receptor (PPAR) agonists include, e.g., tesaglitazar (AZ-242) (AstraZeneca), Netoglitazone (MCC-555) (Mitsubishi/Johnson & Johnson), GW-409544 (Ligand Pharniaceuticals/GlaxoSmithKline), GW-501516 (Ligand Pharmaceuticals/GlaxoSmithKline), LY-929 (Ligand Pharmaceuticals and Eli Lilly), LY-465608 (Ligand Pharmaceuticals and Eli Lilly), LY-518674 (Ligand Pharmaceuticals and Eli Lilly), and MK-767 (Merck and Kyorin). Exemplary gene-based therapies include, e.g., AdGWEGF 121.10 (GenVec), ApoAl (UCB Pharma/Groupe Fournier), EG-004 (Trinam) (Ark Therapeutics), and ATP-binding cassette transporter-A1 (ABCA1) (CV Therapeutics/Incyte, Aventis, Xenon). Exemplary Glycoprotein Ilb/IIIa inhibitors include, e.g., roxifiban (also called DMP754, Bristol-Myers Squibb), Gantofiban (Merck KGaA/Yamanouchi), and Cromafiban (Millennium Pharmaceuticals). Exemplary squalene synthase inhibitors include, e.g., BMS-1884941 (Bristol-Myers Squibb), CP-210172 (Pfizer), CP-295697 (Pfizer), CP-294838 (Pfizer), and TAK-475 (Takeda). An exemplary MCP-I inhibitor is, e.g., RS-504393 (Roche Bioscience). The anti-atherosclerotic agent BO-653 (Chugai Pharmaceuticals), and the nicotinic acid derivative Nyclin (Yamanouchi Pharmaceuticals) are also appropriate for administering in combination with a dsRNA featured in the invention. Exemplary combination therapies suitable for administration with a dsRNA targeting PNPLA3 include, e.g., advicor (Niacin/lovastatin from Kos Pharmaceuticals), amlodipine/atorvastatin (Pfizer), and ezetimibe/simvastatin (e.g., Vytorin® 10/10, 10/20, 10/40, and 10/80 tablets by Merck/Schering-Plough Pharmaceuticals). Agents for treating hypertriglyceridemia, and suitable for administration in combination with a dsRNA targeting PNPLA3 include, e.g., lovastatin, niacin Altoprev® Extended-Release Tablets (Andrx Labs), lovastatin Caduet® Tablets (Pfizer), amlodipine besylate, atorvastatin calcium Crestor® Tablets (AstraZeneca), rosuvastatin calcium Lescol® Capsules (Novartis), fluvastatin sodium Lescol® (Reliant, Novartis), fluvastatin sodium Lipitor® Tablets (Parke-Davis), atorvastatin calcium Lofibra® Capsules (Gate), Niaspan Extended-Release Tablets (Kos), niacin Pravachol Tablets (Bristol-Myers Squibb), pravastatin sodium TriCor® Tablets (Abbott), fenofibrate Vytorin® 10/10 Tablets (Merck/Schering-Plough Pharmaceuticals), ezetimibe, simvastatin WelChol™ Tablets (Sankyo), colesevelam hydrochloride Zetia® Tablets (Schering), ezetimibe Zetia® Tablets (Merck/Schering-Plough Pharmaceuticals), and ezetimibe Zocor® Tablets (Merck).

[0675] In some embodiments, an iRNA featured in the invention can be administered with, e.g., pyridoxine, an ACE inhibitor (angiotensin converting enzyme inhibitors), e.g., benazepril (Lotensin); an angiotensin II receptor antagonist (ARB) (e.g., losartan potassium, such as Merck & Co.'s Cozaar®), e.g., Candesartan (Atacand); an HMG-CoA reductase inhibitor (e.g., a statin); calcium binding agents, e.g., Sodium cellulose phosphate (Calcibind); diuretics, e.g., thiazide diuretics, such as hydrochlorothiazide (Microzide); an insulin sensitizer, such as the PPARyagonist pioglitazone, a glp-Ir agonist, such as liraglutatide, vitamin E, an SGLT2 inhibitor, a DPPIV inhibitor, and kidney/liver transplant; or a combination of any of the foregoing.

[0676] In one embodiment, an iRNA agent is administered in combination with an ezetimibe/simvastatin combination (e.g., Vytorin® (Merck/Schering-Plough Pharmaceuticals)). In one embodiment, the iRNA agent is administered to the patient, and then the additional therapeutic agent is administered to the patient (or vice versa). In another embodiment, the iRNA agent and the additional therapeutic agent are administered at the same time.

[0677] The iRNA agent and an additional therapeutic agent and/or treatment may be administered at the same time and/or in the same combination, e.g., parenterally, or the additional therapeutic agent can be administered as part of a separate composition or at separate times and/or by another method known in the art or described herein.

[0678] In one embodiment, an iRNA agent is administered in combination with an ezetimibe/simvastatin combination (e.g., Vytorin® (Merck/Schering-Plough Pharmaceuticals)). In one embodiment, the iRNA agent is administered to the patient, and then the additional therapeutic agent is administered to the patient (or vice versa). In another embodiment, the iRNA agent and the additional therapeutic agent are administered at the same time.

[0679] The iRNA agent and an additional therapeutic agent and/or treatment may be administered at the same time and/or in the same combination, e.g., parenterally, or the additional therapeutic agent can be administered as part of a separate composition or at separate times and/or by another method known in the art or described herein.

### VIII. Kits

[0680] In certain aspects, the instant disclosure provides kits that include a suitable container containing a pharmaceutical formulation of a siRNA compound, e.g., a double-stranded siRNA compound, or siRNA compound, (e.g., a precursor, e.g., a larger siRNA compound which can be processed into a siRNA compound, or a DNA which encodes an siRNA compound, e.g., a double-stranded siRNA compound, or ssiRNA compound, or precursor thereof).

[0681] Such kits include one or more dsRNA agent(s) and instructions for use, e.g., instructions for administering a prophylactically or therapeutically effective amount of a dsRNA agent(s). The dsRNA agent may be in a vial or a pre-filled syringe. The kits may optionally further comprise means for administering the dsRNA agent (e.g., an injection device, such as a pre-filled syringe), or means for measuring the inhibition of PNPLA3 (e.g., means for measuring the inhibition of PNPLA3 mRNA, PNPLA3 protein, and/or PNPLA3 activity). Such means for measuring the inhibition of PNPLA3 may comprise a means for obtaining a sample from a subject, such as, e.g., a plasma sample. The kits of the invention may optionally further comprise means for determining the therapeutically effective or prophylactically effective amount.

[0682] In certain embodiments the individual components of the pharmaceutical formulation may be provided in one container, e.g., a vial or a pre-filled syringe. Alternatively, it may be desirable to provide the components of the pharmaceutical formulation separately in two or more containers, e.g., one container for a siRNA compound preparation, and at least another for a carrier compound. The kit may be packaged in a number of different configurations such as one or more containers in a single box. The different components can be combined, e.g., according to instructions provided with the kit. The components can be combined according to a method described herein, e.g., to prepare and administer a pharmaceutical composition. The kit can also include a delivery device.

[0683] This invention is further illustrated by the following examples which should not be construed as limiting. The entire contents of all references, patents and published patent applications cited throughout this application, as well as the informal Sequence Listing and Figures, are hereby incorporated herein by reference.

### EXAMPLES

### Example 1. iRNA Synthesis

### Source of Reagents

[0684] Where the source of a reagent is not specifically given herein, such reagent can be obtained from any supplier of reagents for molecular biology at a quality/purity standard for application in molecular biology.

siRNA Design

[0685] siRNAs targeting the human Patatin-Like Phospholipase Domain Containing 3 (PNPLA3) gene (human: NCBI refseqID NM_025225.2; NCBI GeneID: 80339) were designed using custom R and Python scripts. The human NM_025225.2 REFSEQ mRNA, has a length of 2805 bases.

[0686] Detailed lists of the unmodified PNPLA3 sense and antisense strand nucleotide sequences are shown in Table 2. Detailed lists of the modified PNPLA3 sense and antisense strand nucleotide sequences are shown in Table 3.

[0687] It is to be understood that, throughout the application, a duplex name without a decimal is equivalent to a duplex name with a decimal which merely references the batch number of the duplex. For example, AD-959917 is equivalent to AD-959917.1.

siRNA Synthesis

[0688] siRNAs were designed, synthesized, and prepared using methods known in the art.

[0689] Briefly, siRNA sequences were synthesized on a 1 μmol scale using a Mermade 192 synthesizer (BioAutomation) with phosphoramidite chemistry on solid supports. The solid support was controlled pore glass (500-1000 Å) loaded with a custom GalNAc ligand (3′-GalNAc conjugates), universal solid support (AM Chemicals), or the first nucleotide of interest. Ancillary synthesis reagents and standard 2-cyanoethyl phosphoramidite monomers (2′-deoxy-2′-fluoro, 2′-O-methyl, RNA, DNA) were obtained from Thermo-Fisher (Milwaukee, WI), Hongene (China), or Chemgenes (Wilmington, MA, USA). Additional phosphoramidite monomers were procured from commercial suppliers, prepared in-house, or procured using custom synthesis from various CMOs. Phosphoramidites were prepared at a concentration of 100 mM in either acetonitrile or 9:1 acetonitrile:DMF and were coupled using 5-Ethylthio-1H-tetrazole (ETT, 0.25 M in acetonitrile) with a reaction time of 400 s. Phosphorothioate linkages were generated using a 100 mM solution of 3-((Dimethylamino-methylidene) amino)-3H-1,2,4-dithiazole-3-thione (DDTT, obtained from Chemgenes (Wilmington, MA, USA)) in anhydrous acetonitrile/pyridine (9:1 v/v). Oxidation time was 5 minutes. All sequences were synthesized with final removal of the DMT group (“DMT-Off”).

[0690] Upon completion of the solid phase synthesis, solid-supported oligoribonucleotides were treated with 300 μL of Methylamine (40% aqueous) at room temperature in 96 well plates for approximately 2 hours to afford cleavage from the solid support and subsequent removal of all additional base-labile protecting groups. For sequences containing any natural ribonucleotide linkages (2′-OH) protected with a tert-butyl dimethyl silyl (TBDMS) group, a second deprotection step was performed using TEA.3HF (triethylamine trihydrofluoride). To each oligonucleotide solution in aqueous methylamine was added 200 μL of dimethyl sulfoxide (DMSO) and 300 μL TEA.3HF and the solution was incubated for approximately 30 mins at 60° C. After incubation, the plate was allowed to come to room temperature and crude oligonucleotides were precipitated by the addition of 1 mL of 9:1 acetontrile:ethanol or 1:1 ethanol:isopropanol. The plates were then centrifuged at 4° C. for 45 mins and the supernatant carefully decanted with the aid of a multichannel pipette. The oligonucleotide pellet was resuspended in 20 mM NaOAc and subsequently desalted using a HiTrap size exclusion column (5 mL, GE Healthcare) on an Agilent LC system equipped with an autosampler, UV detector, conductivity meter, and fraction collector. Desalted samples were collected in 96 well plates and then analyzed by LC-MS and UV spectrometry to confirm identity and quantify the amount of material, respectively.

[0691] Duplexing of single strands was performed on a Tecan liquid handling robot. Sense and antisense single strands were combined in an equimolar ratio to a final concentration of 10 μM in 1×PBS in 96 well plates, the plate sealed, incubated at 100° C. for 10 minutes, and subsequently allowed to return slowly to room temperature over a period of 2-3 hours. The concentration and identity of each duplex was confirmed and then subsequently utilized for in vitro screening assays.

### Example 2. In Vitro Screening Methods

### Hep3B Cell Culture and 384-Well Transfections

[0692] Hep3b and HepG2 cells (ATCC, Manassas, VA) were grown to near confluence at 37° C. in an atmosphere of 5% CO₂ in Eagle's Minimum Essential Medium (Gibco) supplemented with 10% FBS (ATCC) before being released from the plate by trypsinization. Transfection was carried out by adding 14.8 μl of Opti-MEM plus 0.2 μl of Lipofectamine RNAiMax per well (Invitrogen, Carlsbad CA. cat #13778-150) to 5 μl of each siRNA duplex to an individual well in a 384-well plate. The mixture was then incubated at room temperature for 15 minutes. Eighty μl of complete growth media without antibiotic containing ˜2×10⁴ Hep3B or HepG2 cells were then added to the siRNA mixture. Cells were incubated for 24 hours prior to RNA purification. Single dose experiments were performed at 50 nM, 10 nM and 1 nM final duplex concentration.

Total RNA Isolation Using DYNABEADS mRNA Isolation Kit (Invitrogen™, Part #. 610-12)

[0693] Cells were lysed in 75 μl of Lysis/Binding Buffer containing 3 μL of beads per well and mixed for 10 minutes on an electrostatic shaker. The washing steps were automated on a Biotek EL406, using a magnetic plate support. Beads were washed (in 90 L) once in Buffer A, once in Buffer B, and twice in Buffer E, with aspiration steps in between. Following a final aspiration, complete 10 μL RT mixture was added to each well, as described below.

cDNA Synthesis Using ABI High Capacity cDNA Reverse Transcription Kit (Applied Biosystems, Foster City, CA, Cat #4368813)

[0694] A master mix of 1 μl 10× Buffer, 0.4 μl 25χ dNTPs, 1 μl Random primers, 0.5 μl Reverse Transcriptase, 0.5 μl RNase inhibitor and 6.6 μl of H₂O per reaction were added per well. Plates were sealed, agitated for 10 minutes on an electrostatic shaker, and then incubated at 37 degrees C. for 2 hours. Following this, the plates were agitated at 80 degrees C. for 8 minutes.

### Real Time PCR

[0695] Two microlitre (μl) of cDNA were added to a master mix containing 0.5 μl of human GAPDH TaqMan Probe (4326317E), 0.5 μl human PNPLA3, 2 μl nuclease-free water and 5 μl Lightcycler 480 probe master mix (Roche Cat #04887301001) per well in a 384 well plates (Roche cat #04887301001). Real time PCR is done in a LightCycler480 Real Time PCR system (Roche).

[0696] To calculate relative fold change, data were analyzed using the ΔΔCt method and normalized to assays performed with cells transfected with 10 nM AD-1955, or mock transfected cells. IC₅₀s were calculated using a 4 parameter fit model using XLFit and normalized to cells transfected with AD-1955 or mock-transfected. The sense and antisense sequences of AD-1955 are: sense:

sense:
(SEQ ID NO: 18)
cuuAcGcuGAGuAcuucGAdTsdT
and
antisense
(SEQ ID NO: 19)
UCGAAGuACUcAGCGuAAGdTsdT.

[0697] The results of the screening of the dsRNA agents listed in Tables 1 and 2 in Hep3b cells are shown in Table 4. The results of the screening of the dsRNA agents listed in Tables 1 and 2 in HepG2 cells are shown in Table 5.

TABLE 1
Abbreviations of nucleotide monomers used in nucleic acid sequence representation. It will
be understood that these monomers, when present in an oligonucleotide, are mutually linked by 5′-3′-
phosphodiester bonds; and it is understood that when the nucleotide contains a 2′-fluoro modification, then
the fluoro replaces the hydroxy at that position in the parent nucleotide (i.e., it is a 2′-deoxy-2′-fluoronucleotide).

| Abbre- | |
|---|---|
| viation | Nucleotide(s) |
| A | Adenosine-3′-phosphate |
| Ab | beta-L-adenosine-3\grave{ }-phosphate |
| Abs | beta-L-adenosine-3\grave{ }-phosphorothioate |
| Af | 2′-fluoroadenosine-3′-phosphate |
| Afs | 2′-fluoroadenosine-3′-phosphorothioate |
| As | adenosine-3′-phosphorothioate |
| C | cytidine-3′-phosphate |
| Cb | beta-L-cytidine-3\grave{ }-phosphate |
| Cbs | beta-L-cytidine-3′-phosphorothioate |
| Cf | 2′-fluorocytidine-3′-phosphate |
| Cfs | 2′-fluorocytidine-3′-phosphorothioate |
| Cs | cytidine-3′-phosphorothioate |
| G | guanosine-3′-phosphate |
| Gb | beta-L-guanosine-3\grave{ }-phosphate |
| Gbs | beta-L-guanosine-3\grave{ }-phosphorothioate |
| Gf | 2′-fluoroguanosine-3′-phosphate |
| Gfs | 2′-fluoroguanosine-3′-phosphorothioate |
| Gs | guanosine-3′-phosphorothioate |
| T | 5′-methyluridine-3′-phosphate |
| Tf | 2′-fluoro-5-methyluridine-3′-phosphate |
| Tfs | 2′-fluoro-5-methyluridine-3′-phosphorothioate |
| Ts | 5-methyluridine-3′-phosphorothioate |
| U | Uridine-3′-phosphate |
| Uf | 2′-fluorouridine-3′-phosphate |
| Ufs | 2′-fluorouridine-3′-phosphorothioate |
| Us | uridine-3′-phosphorothioate |
| N | any nucleotide, modified or unmodified |
| a | 2′-O-methyladenosine-3′-phosphate |
| as | 2′-O-methyladenosine-3′-phosphorothioate |
| c | 2′-O-methylcytidine-3′-phosphate |
| cs | 2′-O-methylcytidine-3′-phosphorothioate |
| g | 2′-O-methylguanosine-3′-phosphate |
| gs | 2′-O-methylguanosine-3′-phosphorothioate |
| t | 2′-O-methyl-5-methyluridine-3′-phosphate |
| ts | 2′-O-methyl-5-methyluridine-3′-phosphorothioate |
| u | 2′-O-methyluridine-3′-phosphate |
| us | 2′-O-methyluridine-3′-phosphorothioate |
| s | phosphorothioate linkage |
| L10 | N-(cholesterylcarboxamidocaproyl)-4-hydroxyprolinol (Hyp-C6-Chol) |
| L96 | N-[tris(GalNAc-alkyl)-amidodecanoyl)]-4-hydroxyprolinol (Hyp-(GalNAc-alkyl)3) |
| | [chemical structure] |
| Y34 | 2-hydroxymethyl-tetrahydrofurane-4-methoxy-3-phosphate (abasic 2′-OMe furanose) |
| Y44 | inverted abasic DNA (2-hydroxymethyl-tetrahydrofurane-5-phosphate) |
| (Agn) | Adenosine-glycol nucleic acid (GNA) |
| (Cgn) | Cytidine-glycol nucleic acid (GNA) |
| (Ggn) | Guanosine-glycol nucleic acid (GNA) |
| (Tgn) | Thymidine-glycol nucleic acid (GNA) S-Isomer |
| P | Phosphate |
| VP | Vinyl-phosphonate |
| dA | 2\grave{ }-deoxyadenosine-3\grave{ }-phosphate |
| dAs | 2\grave{ }-deoxyadenosine-3\grave{ }-phosphorothioate |
| dC | 2\grave{ }-deoxycytidine-3\grave{ }-phosphate |
| dCs | 2\grave{ }-deoxycytidine-3\grave{ }-phosphorothioate |
| dG | 2\grave{ }-deoxyguanosine-3\grave{ }-phosphate |
| dGs | 2\grave{ }-deoxyguanosine-3\grave{ }-phosphorothioate |
| dT | 2\grave{ }-deoxythymidine-3\grave{ }-phosphate |
| dTs | 2\grave{ }-deoxythymidine-3\grave{ }-phosphorothioate |
| dU | 2\grave{ }-deoxyuridine |
| dUs | 2\grave{ }-deoxyuridine-3\grave{ }-phosphorothioate |
| (C2p) | cytidine-2\grave{ }-phosphate |
| (G2p) | guanosine-2\grave{ }-phosphate |
| (U2p) | uridine-2\grave{ }-phosphate |
| (A2p) | adenosine-2\grave{ }-phosphate |
| (Chd) | 2′-O-hexadecyl-cytidine-3′-phosphate |
| (Ahd) | 2′-O-hexadecyl-adenosine-3′-phosphate |
| (Ghd) | 2′-O-hexadecyl-guanosine-3′-phosphate |
| (Uhd) | 2′-O-hexadecyl-uridine-3′-phosphate |

TABLE 2
Unmodifed Sense and Antisense Strand Sequences of PNPLA3 dsRNA Agents

| Duplex | Sense | SEQ | Range in | Antisense | SEQ | Range in |
|---|---|---|---|---|---|---|
| Name | Sequence 5′ to 3′ | ID NO: | NM_025225.2 | Sequence 5′ to 3′ | ID NO: | NM_025225.2 |
| AD-1526763 | CGCGGCUGGAGCUUGUCCUUU | 20 | 189-209 | AAAGGACAAGCUCCAGCCGCGCU | 301 | 187-209 |
| AD-1526764 | GCGGCUUCCUGGGCUUCUACU | 21 | 217-237 | AGUAGAAGCCCAGGAAGCCGCAG | 302 | 215-237 |
| AD-1526765 | CGGCUUCCUGGGCUUCUACCU | 22 | 218-238 | AGGUAGAAGCCCAGGAAGCCGCA | 303 | 216-238 |
| AD-1526766 | CGGCUUCCUGGGCUUCUACCU | 22 | 218-238 | AGGUAGAAGCCCAGGAAGCCGCA | 303 | 216-238 |
| AD-1526767 | CUUCCUGGGCUUCUACCACGU | 23 | 221-241 | ACGUGGTAGAAGCCCAGGAAGCC | 304 | 219-241 |
| AD-1526768 | CCUGGGCUUCUACCACGUCGU | 24 | 224-244 | ACGACGUGGUAGAAGCCCAGGAA | 305 | 222-244 |
| AD-1526769 | CUGGGCUUCUACCACGUCGGU | 25 | 225-245 | ACCGACGUGGUAGAAGCCCAGGA | 306 | 223-245 |
| AD-1526770 | CGCGACGCGCGCAUGUUGUUU | 26 | 285-305 | AAACAACAUGCGCGCGUCGCGGA | 307 | 283-305 |
| AD-1526771 | CCGCUGGAGCAGACUCUGCAU | 27 | 354-374 | AUGCAGAGUCUGCUCCAGCGGGA | 308 | 352-374 |
| AD-1526772 | GGAGCAGACUCUGCAGGUCCU | 28 | 359-379 | AGGACCTGCAGAGUCUGCUCCAG | 309 | 357-379 |
| AD-1526773 | GACUCUGCAGGUCCUCUCAGU | 29 | 365-385 | ACUGAGAGGACCUGCAGAGUCUG | 310 | 363-385 |
| AD-1527072 | CUCUGCAGGUCCUCUCAGAUU | 30 | 367-387 | AAUCTGAGAGGACCUGCAGAGUC | 311 | 365-387 |
| AD-1527073 | CUGCAGGUCCUCUCAGAUCUU | 31 | 369-389 | AAGATCTGAGAGGACCUGCAGAG | 312 | 367-389 |
| AD-1526776 | UGCAGGUCCUCUCAGAUCUUU | 32 | 370-390 | AAAGAUCUGAGAGGACCUGCAGA | 313 | 368-390 |
| AD-1526777 | GCAGGUCCUCUCAGAUCUUGU | 33 | 371-391 | ACAAGAUCUGAGAGGACCUGCAG | 314 | 369-391 |
| AD-1526778 | AGGCCAGGAGUCGGAACAUUU | 34 | 397-417 | AAAUGUTCCGACUCCUGGCCUUC | 315 | 395-417 |
| AD-1527074 | GGCCAGGAGUCGGAACAUUGU | 35 | 398-418 | ACAATGTUCCGACUCCUGGCCUU | 316 | 396-418 |
| AD-1526780 | GCCAGGAGUCGGAACAUUGGU | 36 | 399-419 | ACCAAUGUUCCGACUCCUGGCCU | 317 | 397-419 |
| AD-1526781 | GCAUCUUCCAUCCAUCCUUCU | 37 | 418-438 | AGAAGGAUGGAUGGAAGAUGCCA | 318 | 416-438 |
| AD-1526782 | UGCCUCCCGGCCAAUGUCCAU | 38 | 474-494 | AUGGACAUUGGCCGGGAGGCAUU | 319 | 472-494 |
| AD-1527075 | CAAUGUCCACCAGCUCAUCUU | 39 | 485-505 | AAGATGAGCUGGUGGACAUUGGC | 320 | 483-505 |
| AD-1526784 | AAUGUCCACCAGCUCAUCUCU | 40 | 486-506 | AGAGAUGAGCUGGUGGACAUUGG | 321 | 484-506 |
| AD-1526785 | GUCCAAAGACGAAGUCGUGGU | 41 | 572-592 | ACCACGACUUCGUCUUUGGACCG | 322 | 570-592 |
| AD-1526786 | UCCAAAGACGAAGUCGUGGAU | 42 | 573-593 | AUCCACGACUUCGUCUUUGGACC | 323 | 571-593 |
| AD-1526787 | CCAAAGACGAAGUCGUGGAUU | 43 | 574-594 | AAUCCACGACUUCGUCUUUGGAC | 324 | 572-594 |
| AD-1526788 | CAAAGACGAAGUCGUGGAUGU | 44 | 575-595 | ACAUCCACGACUUCGUCUUUGGA | 325 | 573-595 |
| AD-1526789 | AGACGAAGUCGUGGAUGCCUU | 45 | 578-598 | AAGGCATCCACGACUUCGUCUUU | 326 | 576-598 |
| AD-1526790 | CUUCUACAGUGGCCUUAUCCU | 46 | 620-640 | AGGAUAAGGCCACUGUAGAAGGG | 327 | 618-640 |
| AD-1526791 | UUCUACAGUGGCCUUAUCCCU | 47 | 621-641 | AGGGAUAAGGCCACUGUAGAAGG | 328 | 619-641 |
| AD-1526792 | UCUACAGUGGCCUUAUCCCUU | 48 | 622-642 | AAGGGAUAAGGCCACUGUAGAAG | 329 | 620-642 |
| AD-1526793 | CUACAGUGGCCUUAUCCCUCU | 49 | 623-643 | AGAGGGAUAAGGCCACUGUAGAA | 330 | 621-643 |
| AD-1526794 | AGUGGCCUUAUCCCUCCUUCU | 50 | 627-647 | AGAAGGAGGGAUAAGGCCACUGU | 331 | 625-647 |
| AD-1526795 | UGGCCUUAUCCCUCCUUCCUU | 51 | 629-649 | AAGGAAGGAGGGAUAAGGCCACU | 332 | 627-649 |
| AD-1526796 | CUUAUCCCUCCUUCCUUCAGU | 52 | 633-653 | ACUGAAGGAAGGAGGGAUAAGGC | 333 | 631-653 |
| AD-1526797 | UUAUCCCUCCUUCCUUCAGAU | 53 | 634-654 | AUCUGAAGGAAGGAGGGAUAAGG | 334 | 632-654 |
| AD-1526798 | CCCUCCUUCCUUCAGAGGCGU | 54 | 638-658 | ACGCCUCUGAAGGAAGGAGGGAU | 335 | 636-658 |
| AD-1526799 | CCUCCUUCCUUCAGAGGCGUU | 55 | 639-659 | AACGCCUCUGAAGGAAGGAGGGA | 336 | 637-659 |
| AD-1526800 | CCUCCUUCCUUCAGAGGCGUU | 55 | 639-659 | AACGCCTCUGAAGGAAGGAGGGA | 337 | 637-659 |
| AD-1526801 | CCUUCCUUCAGAGGCGUGCGU | 56 | 642-662 | ACGCACGCCUCUGAAGGAAGGAG | 338 | 640-662 |
| AD-1526802 | UCCUUCAGAGGCGUGCGAUAU | 57 | 645-665 | AUAUCGCACGCCUCUGAAGGAAG | 339 | 643-665 |
| AD-1526803 | CUUCAGAGGCGUGCGAUAUGU | 58 | 647-667 | ACAUAUCGCACGCCUCUGAAGGA | 340 | 645-667 |
| AD-1526804 | UUCAGAGGCGUGCGAUAUGUU | 59 | 648-668 | AACAUAUCGCACGCCUCUGAAGG | 341 | 646-668 |
| AD-1526805 | UCAGAGGCGUGCGAUAUGUGU | 60 | 649-669 | ACACAUAUCGCACGCCUCUGAAG | 342 | 647-669 |
| AD-1526806 | CAGAGGCGUGCGAUAUGUGGU | 61 | 650-670 | ACCACAUAUCGCACGCCUCUGAA | 343 | 648-670 |
| AD-1526807 | AGAGGCGUGCGAUAUGUGGAU | 62 | 651-671 | AUCCACAUAUCGCACGCCUCUGA | 344 | 649-671 |
| AD-1526808 | AGGCGUGCGAUAUGUGGAUGU | 63 | 653-673 | ACAUCCACAUAUCGCACGCCUCU | 345 | 651-673 |
| AD-1526809 | GGCGUGCGAUAUGUGGAUGGU | 64 | 654-674 | ACCAUCCACAUAUCGCACGCCUC | 346 | 652-674 |
| AD-1526810 | CGUGCGAUAUGUGGAUGGAGU | 65 | 656-676 | ACUCCAUCCACAUAUCGCACGCC | 347 | 654-676 |
| AD-1526811 | GUGCGAUAUGUGGAUGGAGGU | 66 | 657-677 | ACCUCCAUCCACAUAUCGCACGC | 348 | 655-677 |
| AD-1526812 | GUGAGUGACAACGUACCCUUU | 67 | 678-698 | AAAGGGTACGUUGUCACUCACUC | 349 | 676-698 |
| AD-1526813 | AGUGACAACGUACCCUUCAUU | 68 | 681-701 | AAUGAAGGGUACGUUGUCACUCA | 350 | 679-701 |
| AD-1526814 | GUGACAACGUACCCUUCAUUU | 69 | 682-702 | AAAUGAAGGGUACGUUGUCACUC | 351 | 680-702 |
| AD-1526815 | UGACAACGUACCCUUCAUUGU | 70 | 683-703 | ACAAUGAAGGGUACGUUGUCACU | 352 | 681-703 |
| AD-1526816 | GACAACGUACCCUUCAUUGAU | 71 | 684-704 | AUCAAUGAAGGGUACGUUGUCAC | 353 | 682-704 |
| AD-1526817 | ACAACGUACCCUUCAUUGAUU | 72 | 685-705 | AAUCAAUGAAGGGUACGUUGUCA | 354 | 683-705 |
| AD-1526818 | CAACGUACCCUUCAUUGAUGU | 73 | 686-706 | ACAUCAAUGAAGGGUACGUUGUC | 355 | 684-706 |
| AD-1526819 | AACGUACCCUUCAUUGAUGCU | 74 | 687-707 | AGCAUCAAUGAAGGGUACGUUGU | 356 | 685-707 |
| AD-1526820 | CGUACCCUUCAUUGAUGCCAU | 75 | 689-709 | AUGGCATCAAUGAAGGGUACGUU | 357 | 687-709 |
| AD-1526821 | GUACCCUUCAUUGAUGCCAAU | 76 | 690-710 | AUUGGCAUCAAUGAAGGGUACGU | 358 | 688-710 |
| AD-1526822 | UACGACAUCUGCCCUAAAGUU | 77 | 744-764 | AACUUUAGGGCAGAUGUCGUACU | 359 | 742-764 |
| AD-1526823 | CGACAUCUGCCCUAAAGUCAU | 78 | 746-766 | AUGACUUUAGGGCAGAUGUCGUA | 360 | 744-766 |
| AD-1526824 | GACAUCUGCCCUAAAGUCAAU | 79 | 747-767 | AUUGACTUUAGGGCAGAUGUCGU | 361 | 745-767 |
| AD-1526825 | ACAUCUGCCCUAAAGUCAAGU | 80 | 748-768 | ACUUGACUUUAGGGCAGAUGUCG | 362 | 746-768 |
| AD-1526826 | UCUGCCCUAAAGUCAAGUCCU | 81 | 751-771 | AGGACUUGACUUUAGGGCAGAUG | 363 | 749-771 |
| AD-1526827 | UCUGCCCUAAAGUCAAGUCCU | 81 | 751-771 | AGGACUTGACUUUAGGGCAGAUG | 364 | 749-771 |
| AD-1526828 | CUGCCCUAAAGUCAAGUCCAU | 82 | 752-772 | AUGGACTUGACUUUAGGGCAGAU | 365 | 750-772 |
| AD-1526829 | AUGUGGACAUCACCAAGCUCU | 83 | 784-804 | AGAGCUUGGUGAUGUCCACAUGA | 366 | 782-804 |
| AD-1526830 | AUGUGGACAUCACCAAGCUCU | 83 | 784-804 | AGAGCUTGGUGAUGUCCACAUGA | 367 | 782-804 |
| AD-1526831 | UGUGGACAUCACCAAGCUCAU | 84 | 785-805 | AUGAGCTUGGUGAUGUCCACAUG | 368 | 783-805 |
| AD-1527076 | GUCUACGCCUCUGCACAGGGU | 85 | 805-825 | ACCCTGTGCAGAGGCGUAGACUG | 369 | 803-825 |
| AD-1526833 | CCUCUGCACAGGGAACCUCUU | 86 | 812-832 | AAGAGGTUCCCUGUGCAGAGGCG | 370 | 810-832 |
| AD-1526834 | UGCACAGGGAACCUCUACCUU | 87 | 816-836 | AAGGUAGAGGUUCCCUGUGCAGA | 371 | 814-836 |
| AD-1526835 | GCACAGGGAACCUCUACCUUU | 88 | 817-837 | AAAGGUAGAGGUUCCCUGUGCAG | 372 | 815-837 |
| AD-1526836 | CACAGGGAACCUCUACCUUCU | 89 | 818-838 | AGAAGGTAGAGGUUCCCUGUGCA | 373 | 816-838 |
| AD-1526837 | CAGGGAACCUCUACCUUCUCU | 90 | 820-840 | AGAGAAGGUAGAGGUUCCCUGUG | 374 | 818-840 |
| AD-1526838 | AGGGAACCUCUACCUUCUCUU | 91 | 821-841 | AAGAGAAGGUAGAGGUUCCCUGU | 375 | 819-841 |
| AD-1526839 | GGGAACCUCUACCUUCUCUCU | 92 | 822-842 | AGAGAGAAGGUAGAGGUUCCCUG | 376 | 820-842 |
| AD-1527077 | CAAGGUGCUGGGAGAGAUAUU | 93 | 866-886 | AAUATCTCUCCCAGCACCUUGAG | 377 | 864-886 |
| AD-1526841 | AAGGUGCUGGGAGAGAUAUGU | 94 | 867-887 | ACAUAUCUCUCCCAGCACCUUGA | 378 | 865-887 |
| AD-1526842 | AGGUGCUGGGAGAGAUAUGCU | 95 | 868-888 | AGCAUAUCUCUCCCAGCACCUUG | 379 | 866-888 |
| AD-1526843 | GGUGCUGGGAGAGAUAUGCCU | 96 | 869-889 | AGGCAUAUCUCUCCCAGCACCUU | 380 | 867-889 |
| AD-1526844 | GUGCUGGGAGAGAUAUGCCUU | 97 | 870-890 | AAGGCATAUCUCUCCCAGCACCU | 381 | 868-890 |
| AD-1526845 | UGCUGGGAGAGAUAUGCCUUU | 98 | 871-891 | AAAGGCAUAUCUCUCCCAGCACC | 382 | 869-891 |
| AD-1526846 | UGGGAGAGAUAUGCCUUCGAU | 99 | 874-894 | AUCGAAGGCAUAUCUCUCCCAGC | 383 | 872-894 |
| AD-1526847 | GGGAGAGAUAUGCCUUCGAGU | 100 | 875-895 | ACUCGAAGGCAUAUCUCUCCCAG | 384 | 873-895 |
| AD-1526848 | GGAGAGAUAUGCCUUCGAGGU | 101 | 876-896 | ACCUCGAAGGCAUAUCUCUCCCA | 385 | 874-896 |
| AD-1526849 | GAGAGAUAUGCCUUCGAGGAU | 102 | 877-897 | AUCCUCGAAGGCAUAUCUCUCCC | 386 | 875-897 |
| AD-1526850 | GAGAUAUGCCUUCGAGGAUAU | 103 | 879-899 | AUAUCCTCGAAGGCAUAUCUCUC | 387 | 877-899 |
| AD-1526851 | GAUAUGCCUUCGAGGAUAUUU | 104 | 881-901 | AAAUAUCCUCGAAGGCAUAUCUC | 388 | 879-901 |
| AD-1526852 | AUAUGCCUUCGAGGAUAUUUU | 105 | 882-902 | AAAAUAUCCUCGAAGGCAUAUCU | 389 | 880-902 |
| AD-1526853 | UAUGCCUUCGAGGAUAUUUGU | 106 | 883-903 | ACAAAUAUCCUCGAAGGCAUAUC | 390 | 881-903 |
| AD-1526854 | AUGCCUUCGAGGAUAUUUGGU | 107 | 884-904 | ACCAAAUAUCCUCGAAGGCAUAU | 391 | 882-904 |
| AD-1526855 | UGCCUUCGAGGAUAUUUGGAU | 108 | 885-905 | AUCCAAAUAUCCUCGAAGGCAUA | 392 | 883-905 |
| AD-1526856 | CAUUCAGGUUCUUGGAAGAGU | 109 | 907-927 | ACUCUUCCAAGAACCUGAAUGCA | 393 | 905-927 |
| AD-1526857 | AGGUUCUUGGAAGAGAAGGGU | 110 | 912-932 | ACCCUUCUCUUCCAAGAACCUGA | 394 | 910-932 |
| AD-1526858 | GGUUCUUGGAAGAGAAGGGCU | 111 | 913-933 | AGCCCUUCUCUUCCAAGAACCUG | 395 | 911-933 |
| AD-1526859 | GGUUCUUGGAAGAGAAGGGCU | 111 | 913-933 | AGCCCUTCUCUUCCAAGAACCUG | 396 | 911-933 |
| AD-1526860 | GUUCUUGGAAGAGAAGGGCAU | 112 | 914-934 | AUGCCCTUCUCUUCCAAGAACCU | 397 | 912-934 |
| AD-1526861 | AAGAGAAGGGCAUCUGCAACU | 113 | 922-942 | AGUUGCAGAUGCCCUUCUCUUCC | 398 | 920-942 |
| AD-1527078 | GCCUGAAGUCAUCCUCAGAAU | 114 | 955-975 | AUUCTGAGGAUGACUUCAGGCCU | 399 | 953-975 |
| AD-1526863 | CUGAAGUCAUCCUCAGAAGGU | 115 | 957-977 | ACCUUCUGAGGAUGACUUCAGGC | 400 | 955-977 |
| AD-1526864 | UGAAGUCAUCCUCAGAAGGGU | 116 | 958-978 | ACCCUUCUGAGGAUGACUUCAGG | 401 | 956-978 |
| AD-1526865 | GAAGUCAUCCUCAGAAGGGAU | 117 | 959-979 | AUCCCUUCUGAGGAUGACUUCAG | 402 | 957-979 |
| AD-1526866 | AAGUCAUCCUCAGAAGGGAUU | 118 | 960-980 | AAUCCCUUCUGAGGAUGACUUCA | 403 | 958-980 |
| AD-1526867 | AAGUCAUCCUCAGAAGGGAUU | 118 | 960-980 | AAUCCCTUCUGAGGAUGACUUCA | 404 | 958-980 |
| AD-1526868 | AGUCAUCCUCAGAAGGGAUGU | 119 | 961-981 | ACAUCCCUUCUGAGGAUGACUUC | 405 | 959-981 |
| AD-1526869 | UCAUCCUCAGAAGGGAUGGAU | 120 | 963-983 | AUCCAUCCCUUCUGAGGAUGACU | 406 | 961-983 |
| AD-1526870 | GGGAGAUGAGCUGCUAGACCU | 121 | 1064-1084 | AGGUCUAGCAGCUCAUCUCCCUC | 407 | 1062-1084 |
| AD-1527079 | GGAGAUGAGCUGCUAGACCAU | 122 | 1065-1085 | AUGGTCTAGCAGCUCAUCUCCCU | 408 | 1063-1085 |
| AD-1526872 | AGAUGAGCUGCUAGACCACCU | 123 | 1067-1087 | AGGUGGTCUAGCAGCUCAUCUCC | 409 | 1065-1087 |
| AD-1526873 | CUGCUAGACCACCUGCGUCUU | 124 | 1074-1094 | AAGACGCAGGUGGUCUAGCAGCU | 410 | 1072-1094 |
| AD-1526874 | CUAGACCACCUGCGUCUCAGU | 125 | 1077-1097 | ACUGAGACGCAGGUGGUCUAGCA | 411 | 1075-1097 |
| AD-1526875 | CUAGACCACCUGCGUCUCAGU | 125 | 1077-1097 | ACUGAGACGCAGGUGGUCUAGCA | 411 | 1075-1097 |
| AD-1526876 | ACCACCUGCGUCUCAGCAUCU | 126 | 1081-1101 | AGAUGCTGAGACGCAGGUGGUCU | 412 | 1079-1101 |
| AD-1526877 | GCGUCUCAGCAUCCUGCCCUU | 127 | 1088-1108 | AAGGGCAGGAUGCUGAGACGCAG | 413 | 1086-1108 |
| AD-1526878 | GCAUCCUGCCCUGGGAUGAGU | 128 | 1096-1116 | ACUCAUCCCAGGGCAGGAUGCUG | 414 | 1094-1116 |
| AD-1526879 | CAUCCUGCCCUGGGAUGAGAU | 129 | 1097-1117 | AUCUCATCCCAGGGCAGGAUGCU | 415 | 1095-1117 |
| AD-1527080 | AUCCUGCCCUGGGAUGAGAGU | 130 | 1098-1118 | ACUCTCAUCCCAGGGCAGGAUGC | 416 | 1096-1118 |
| AD-1526881 | UGCCCUGGGAUGAGAGCAUCU | 131 | 1102-1122 | AGAUGCTCUCAUCCCAGGGCAGG | 417 | 1100-1122 |
| AD-1526882 | CCUGGGAUGAGAGCAUCCUGU | 132 | 1105-1125 | ACAGGAUGCUCUCAUCCCAGGGC | 418 | 1103-1125 |
| AD-1526883 | AAUGAAAGACAAAGGUGGAUU | 133 | 1166-1186 | AAUCCACCUUUGUCUUUCAUUUC | 419 | 1164-1186 |
| AD-1526884 | AUGAAAGACAAAGGUGGAUAU | 134 | 1167-1187 | AUAUCCACCUUUGUCUUUCAUUU | 420 | 1165-1187 |
| AD-1527081 | AGACAAAGGUGGAUACAUGAU | 135 | 1172-1192 | AUCATGTAUCCACCUUUGUCUUU | 421 | 1170-1192 |
| AD-1526886 | ACAAAGGUGGAUACAUGAGCU | 136 | 1174-1194 | AGCUCAUGUAUCCACCUUUGUCU | 422 | 1172-1194 |
| AD-1527082 | CAAAGGUGGAUACAUGAGCAU | 137 | 1175-1195 | AUGCTCAUGUAUCCACCUUUGUC | 423 | 1173-1195 |
| AD-1526888 | AAGGUGGAUACAUGAGCAAGU | 138 | 1177-1197 | ACUUGCTCAUGUAUCCACCUUUG | 424 | 1175-1197 |
| AD-1526889 | GGAUACAUGAGCAAGAUUUGU | 139 | 1182-1202 | ACAAAUCUUGCUCAUGUAUCCAC | 425 | 1180-1202 |
| AD-1526890 | GAUACAUGAGCAAGAUUUGCU | 140 | 1183-1203 | AGCAAAUCUUGCUCAUGUAUCCA | 426 | 1181-1203 |
| AD-1526891 | AUACAUGAGCAAGAUUUGCAU | 141 | 1184-1204 | AUGCAAAUCUUGCUCAUGUAUCC | 427 | 1182-1204 |
| AD-1526892 | UACAUGAGCAAGAUUUGCAAU | 142 | 1185-1205 | AUUGCAAAUCUUGCUCAUGUAUC | 428 | 1183-1205 |
| AD-1526893 | ACAUGAGCAAGAUUUGCAACU | 143 | 1186-1206 | AGUUGCAAAUCUUGCUCAUGUAU | 429 | 1184-1206 |
| AD-1526894 | UGAGCAAGAUUUGCAACUUGU | 144 | 1189-1209 | ACAAGUUGCAAAUCUUGCUCAUG | 430 | 1187-1209 |
| AD-1526895 | GAGCAAGAUUUGCAACUUGCU | 145 | 1190-1210 | AGCAAGTUGCAAAUCUUGCUCAU | 431 | 1188-1210 |
| AD-1526896 | AGCAAGAUUUGCAACUUGCUU | 146 | 1191-1211 | AAGCAAGUUGCAAAUCUUGCUCA | 432 | 1189-1211 |
| AD-1526897 | GCAAGAUUUGCAACUUGCUAU | 147 | 1192-1212 | AUAGCAAGUUGCAAAUCUUGCUC | 433 | 1190-1212 |
| AD-1526898 | GCAAGAUUUGCAACUUGCUAU | 147 | 1192-1212 | AUAGCAAGUUGCAAAUCUUGCUC | 433 | 1190-1212 |
| AD-1526899 | UGCAACUUGCUACCCAUUAGU | 148 | 1200-1220 | ACUAAUGGGUAGCAAGUUGCAAA | 434 | 1198-1220 |
| AD-1526900 | GCAACUUGCUACCCAUUAGGU | 149 | 1201-1221 | ACCUAAUGGGUAGCAAGUUGCAA | 435 | 1199-1221 |
| AD-1526901 | CAACUUGCUACCCAUUAGGAU | 150 | 1202-1222 | AUCCUAAUGGGUAGCAAGUUGCA | 436 | 1200-1222 |
| AD-1526902 | AACUUGCUACCCAUUAGGAUU | 151 | 1203-1223 | AAUCCUAAUGGGUAGCAAGUUGC | 437 | 1201-1223 |
| AD-1526903 | ACUUGCUACCCAUUAGGAUAU | 152 | 1204-1224 | AUAUCCTAAUGGGUAGCAAGUUG | 438 | 1202-1224 |
| AD-1526904 | GCUGCCCUGUACCCUGCCUGU | 153 | 1238-1258 | ACAGGCAGGGUACAGGGCAGCAU | 439 | 1236-1258 |
| AD-1526905 | CCCUGUACCCUGCCUGUGGAU | 154 | 1242-1262 | AUCCACAGGCAGGGUACAGGGCA | 440 | 1240-1262 |
| AD-1526906 | AAUCUGCCAUUGCGAUUGUCU | 155 | 1261-1281 | AGACAAUCGCAAUGGCAGAUUCC | 441 | 1259-1281 |
| AD-1526907 | CUGCCAUUGCGAUUGUCCAGU | 156 | 1264-1284 | ACUGGACAAUCGCAAUGGCAGAU | 442 | 1262-1284 |
| AD-1526908 | UGCCAUUGCGAUUGUCCAGAU | 157 | 1265-1285 | AUCUGGACAAUCGCAAUGGCAGA | 443 | 1263-1285 |
| AD-1527083 | CAUUGCGAUUGUCCAGAGACU | 158 | 1268-1288 | AGUCTCTGGACAAUCGCAAUGGC | 444 | 1266-1288 |
| AD-1526910 | UUGCGAUUGUCCAGAGACUGU | 159 | 1270-1290 | ACAGUCUCUGGACAAUCGCAAUG | 445 | 1268-1290 |
| AD-1527084 | UUGCGAUUGUCCAGAGACUGU | 159 | 1270-1290 | ACAGTCTCUGGACAAUCGCAAUG | 446 | 1268-1290 |
| AD-1526912 | UGCGAUUGUCCAGAGACUGGU | 160 | 1271-1291 | ACCAGUCUCUGGACAAUCGCAAU | 447 | 1269-1291 |
| AD-1526913 | GCGAUUGUCCAGAGACUGGUU | 161 | 1272-1292 | AACCAGTCUCUGGACAAUCGCAA | 448 | 1270-1292 |
| AD-1526914 | CGAUUGUCCAGAGACUGGUGU | 162 | 1273-1293 | ACACCAGUCUCUGGACAAUCGCA | 449 | 1271-1293 |
| AD-1526915 | GAUUGUCCAGAGACUGGUGAU | 163 | 1274-1294 | AUCACCAGUCUCUGGACAAUCGC | 450 | 1272-1294 |
| AD-1527085 | UGUCCAGAGACUGGUGACAUU | 164 | 1277-1297 | AAUGTCACCAGUCUCUGGACAAU | 451 | 1275-1297 |
| AD-1526917 | CAGAGACUGGUGACAUGGCUU | 165 | 1281-1301 | AAGCCAUGUCACCAGUCUCUGGA | 452 | 1279-1301 |
| AD-1526918 | AGAGACUGGUGACAUGGCUUU | 166 | 1282-1302 | AAAGCCAUGUCACCAGUCUCUGG | 453 | 1280-1302 |
| AD-1526919 | AGAGACUGGUGACAUGGCUUU | 166 | 1282-1302 | AAAGCCAUGUCACCAGUCUCUGG | 453 | 1280-1302 |
| AD-1526920 | ACUGGUGACAUGGCUUCCAGU | 167 | 1286-1306 | ACUGGAAGCCAUGUCACCAGUCU | 454 | 1284-1306 |
| AD-1526921 | CUGGUGACAUGGCUUCCAGAU | 168 | 1287-1307 | AUCUGGAAGCCAUGUCACCAGUC | 455 | 1285-1307 |
| AD-1527086 | GUGACAUGGCUUCCAGAUAUU | 169 | 1290-1310 | AAUATCTGGAAGCCAUGUCACCA | 456 | 1288-1310 |
| AD-1526923 | UGACAUGGCUUCCAGAUAUGU | 170 | 1291-1311 | ACAUAUCUGGAAGCCAUGUCACC | 457 | 1289-1311 |
| AD-1526924 | GACAUGGCUUCCAGAUAUGCU | 171 | 1292-1312 | AGCAUAUCUGGAAGCCAUGUCAC | 458 | 1290-1312 |
| AD-1526925 | ACAUGGCUUCCAGAUAUGCCU | 172 | 1293-1313 | AGGCAUAUCUGGAAGCCAUGUCA | 459 | 1291-1313 |
| AD-1526926 | CAUGGCUUCCAGAUAUGCCCU | 173 | 1294-1314 | AGGGCATAUCUGGAAGCCAUGUC | 460 | 1292-1314 |
| AD-1526927 | AUGGCUUCCAGAUAUGCCCGU | 174 | 1295-1315 | ACGGGCAUAUCUGGAAGCCAUGU | 461 | 1293-1315 |
| AD-1526928 | AUGGCUUCCAGAUAUGCCCGU | 174 | 1295-1315 | ACGGGCAUAUCUGGAAGCCAUGU | 461 | 1293-1315 |
| AD-1526929 | GCUUCCAGAUAUGCCCGACGU | 175 | 1298-1318 | ACGUCGGGCAUAUCUGGAAGCCA | 462 | 1296-1318 |
| AD-1526930 | GCAGUGGGUGACCUCACAGGU | 176 | 1331-1351 | ACCUGUGAGGUCACCCACUGCAA | 463 | 1329-1351 |
| AD-1526931 | CCUCCAGGUCCCAAAUGCCAU | 177 | 1384-1404 | AUGGCATUUGGGACCUGGAGGCG | 464 | 1382-1404 |
| AD-1526932 | CUCCAGGUCCCAAAUGCCAGU | 178 | 1385-1405 | ACUGGCAUUUGGGACCUGGAGGC | 465 | 1383-1405 |
| AD-1526933 | CUCCAGGUCCCAAAUGCCAGU | 178 | 1385-1405 | ACUGGCAUUUGGGACCUGGAGGC | 465 | 1383-1405 |
| AD-1526934 | AGGUCCCAAAUGCCAGUGAGU | 179 | 1389-1409 | ACUCACUGGCAUUUGGGACCUGG | 466 | 1387-1409 |
| AD-1527087 | GUCCCAAAUGCCAGUGAGCAU | 180 | 1391-1411 | AUGCTCACUGGCAUUUGGGACCU | 467 | 1389-1411 |
| AD-1527088 | CCUCAGGUCCAGCCUGAACUU | 181 | 1520-1540 | AAGUTCAGGCUGGACCUGAGGAU | 468 | 1518-1540 |
| AD-1526937 | UCAGGUCCAGCCUGAACUUCU | 182 | 1522-1542 | AGAAGUUCAGGCUGGACCUGAGG | 469 | 1520-1542 |
| AD-1526938 | UCAGGUCCAGCCUGAACUUCU | 182 | 1522-1542 | AGAAGUTCAGGCUGGACCUGAGG | 470 | 1520-1542 |
| AD-1526939 | CAGGUCCAGCCUGAACUUCUU | 183 | 1523-1543 | AAGAAGTUCAGGCUGGACCUGAG | 471 | 1521-1543 |
| AD-1526940 | AGGUCCAGCCUGAACUUCUUU | 184 | 1524-1544 | AAAGAAGUUCAGGCUGGACCUGA | 472 | 1522-1544 |
| AD-1526941 | GGUCCAGCCUGAACUUCUUCU | 185 | 1525-1545 | AGAAGAAGUUCAGGCUGGACCUG | 473 | 1523-1545 |
| AD-1526942 | UUGGGCAAUAAAGUACCUGCU | 186 | 1545-1565 | AGCAGGTACUUUAUUGCCCAAGA | 474 | 1543-1565 |
| AD-1526943 | GGCAAUAAAGUACCUGCUGGU | 187 | 1548-1568 | ACCAGCAGGUACUUUAUUGCCCA | 475 | 1546-1568 |
| AD-1526944 | AAUAAAGUACCUGCUGGUGCU | 188 | 1551-1571 | AGCACCAGCAGGUACUUUAUUGC | 476 | 1549-1571 |
| AD-1526945 | AAUAAAGUACCUGCUGGUGCU | 188 | 1551-1571 | AGCACCAGCAGGUACUUUAUUGC | 476 | 1549-1571 |
| AD-1526946 | AAAGUACCUGCUGGUGCUGAU | 189 | 1554-1574 | AUCAGCACCAGCAGGUACUUUAU | 477 | 1552-1574 |
| AD-1526947 | ACUUGAGGAGGCGAGUCUAGU | 190 | 1623-1643 | ACUAGACUCGCCUCCUCAAGUGA | 478 | 1621-1643 |
| AD-1526948 | GUUUCCCAUCUUUGUGCAGCU | 191 | 1666-1686 | AGCUGCACAAAGAUGGGAAACUU | 479 | 1664-1686 |
| AD-1526949 | UCCCAUCUUUGUGCAGCUACU | 192 | 1669-1689 | AGUAGCTGCACAAAGAUGGGAAA | 480 | 1667-1689 |
| AD-1526950 | CAUCUUUGUGCAGCUACCUCU | 193 | 1672-1692 | AGAGGUAGCUGCACAAAGAUGGG | 481 | 1670-1692 |
| AD-1526951 | CAUCUUUGUGCAGCUACCUCU | 193 | 1672-1692 | AGAGGUAGCUGCACAAAGAUGGG | 481 | 1670-1692 |
| AD-1526952 | UGUGCAGCUACCUCCGCAUUU | 194 | 1678-1698 | AAAUGCGGAGGUAGCUGCACAAA | 482 | 1676-1698 |
| AD-1526953 | UGCAGCUACCUCCGCAUUGCU | 195 | 1680-1700 | AGCAAUGCGGAGGUAGCUGCACA | 483 | 1678-1700 |
| AD-1526954 | UGCCUGUGACGUGGAGGAUCU | 196 | 1714-1734 | AGAUCCTCCACGUCACAGGCAGG | 484 | 1712-1734 |
| AD-1526955 | CAGCCUCUGAGCUGAGUUGGU | 197 | 1735-1755 | ACCAACUCAGCUCAGAGGCUGGG | 485 | 1733-1755 |
| AD-1526956 | AGCCUCUGAGCUGAGUUGGUU | 198 | 1736-1756 | AACCAACUCAGCUCAGAGGCUGG | 486 | 1734-1756 |
| AD-1526957 | GCCUCUGAGCUGAGUUGGUUU | 199 | 1737-1757 | AAACCAACUCAGCUCAGAGGCUG | 487 | 1735-1757 |
| AD-1526958 | CCUCUGAGCUGAGUUGGUUUU | 200 | 1738-1758 | AAAACCAACUCAGCUCAGAGGCU | 488 | 1736-1758 |
| AD-1526959 | CUCUGAGCUGAGUUGGUUUUU | 201 | 1739-1759 | AAAAACCAACUCAGCUCAGAGGC | 489 | 1737-1759 |
| AD-1526960 | UCUGAGCUGAGUUGGUUUUAU | 202 | 1740-1760 | AUAAAACCAACUCAGCUCAGAGG | 490 | 1738-1760 |
| AD-1526961 | CUGAGCUGAGUUGGUUUUAUU | 203 | 1741-1761 | AAUAAAACCAACUCAGCUCAGAG | 491 | 1739-1761 |
| AD-1526962 | UGAGCUGAGUUGGUUUUAUGU | 204 | 1742-1762 | ACAUAAAACCAACUCAGCUCAGA | 492 | 1740-1762 |
| AD-1526963 | GAGCUGAGUUGGUUUUAUGAU | 205 | 1743-1763 | AUCAUAAAACCAACUCAGCUCAG | 493 | 1741-1763 |
| AD-1526964 | AGCUGAGUUGGUUUUAUGAAU | 206 | 1744-1764 | AUUCAUAAAACCAACUCAGCUCA | 494 | 1742-1764 |
| AD-1526965 | GCUGAGUUGGUUUUAUGAAAU | 207 | 1745-1765 | AUUUCATAAAACCAACUCAGCUC | 495 | 1743-1765 |
| AD-1193373 | CUGAGUUGGUUUUAUGAAAAU | 208 | 1746-1766 | AUUUTCAUAAAACCAACUCAGCU | 496 | 1744-1766 |
| AD-1526967 | GAGUUGGUUUUAUGAAAAGCU | 209 | 1748-1768 | AGCUUUUCAUAAAACCAACUCAG | 497 | 1746-1768 |
| AD-1526968 | AGUUGGUUUUAUGAAAAGCUU | 210 | 1749-1769 | AAGCUUUUCAUAAAACCAACUCA | 498 | 1747-1769 |
| AD-1526969 | GUUGGUUUUAUGAAAAGCUAU | 211 | 1750-1770 | AUAGCUTUUCAUAAAACCAACUC | 499 | 1748-1770 |
| AD-1526970 | UUGGUUUUAUGAAAAGCUAGU | 212 | 1751-1771 | ACUAGCUUUUCAUAAAACCAACU | 500 | 1749-1771 |
| AD-1526971 | UUGGUUUUAUGAAAAGCUAGU | 212 | 1751-1771 | ACUAGCTUUUCAUAAAACCAACU | 501 | 1749-1771 |
| AD-1526972 | UGGUUUUAUGAAAAGCUAGGU | 213 | 1752-1772 | ACCUAGCUUUUCAUAAAACCAAC | 502 | 1750-1772 |
| AD-1526973 | GUUUUAUGAAAAGCUAGGAAU | 214 | 1754-1774 | AUUCCUAGCUUUUCAUAAAACCA | 503 | 1752-1774 |
| AD-1526974 | GUUUUAUGAAAAGCUAGGAAU | 214 | 1754-1774 | AUUCCUAGCUUUUCAUAAAACCA | 503 | 1752-1774 |
| AD-1526975 | UUUUAUGAAAAGCUAGGAAGU | 215 | 1755-1775 | ACUUCCUAGCUUUUCAUAAAACC | 504 | 1753-1775 |
| AD-1526976 | UUUUAUGAAAAGCUAGGAAGU | 215 | 1755-1775 | ACUUCCTAGCUUUUCAUAAAACC | 505 | 1753-1775 |
| AD-1526977 | UAUGAAAAGCUAGGAAGCAAU | 216 | 1758-1778 | AUUGCUTCCUAGCUUUUCAUAAA | 506 | 1756-1778 |
| AD-1526978 | AUUCAGCUGGUUGGGAAAUGU | 217 | 1832-1852 | ACAUUUCCCAACCAGCUGAAUUA | 507 | 1830-1852 |
| AD-1526979 | CAGCUGGUUGGGAAAUGACAU | 218 | 1835-1855 | AUGUCATUUCCCAACCAGCUGAA | 508 | 1833-1855 |
| AD-1527089 | AGCUGGUUGGGAAAUGACACU | 219 | 1836-1856 | AGUGTCAUUUCCCAACCAGCUGA | 509 | 1834-1856 |
| AD-1526981 | GUGCAGAGGGUCCCUUACUGU | 220 | 1867-1887 | ACAGUAAGGGACCCUCUGCACUG | 510 | 1865-1887 |
| AD-1526982 | UGCAGAGGGUCCCUUACUGAU | 221 | 1868-1888 | AUCAGUAAGGGACCCUCUGCACU | 511 | 1866-1888 |
| AD-1526983 | GCAGAGGGUCCCUUACUGACU | 222 | 1869-1889 | AGUCAGTAAGGGACCCUCUGCAC | 512 | 1867-1889 |
| AD-1526984 | UUAAUGGUCAGACUGUUCCAU | 223 | 1904-1924 | AUGGAACAGUCUGACCAUUAAUA | 513 | 1902-1924 |
| AD-1526985 | UAAUGGUCAGACUGUUCCAGU | 224 | 1905-1925 | ACUGGAACAGUCUGACCAUUAAU | 514 | 1903-1925 |
| AD-1526986 | ACGACACUGCCUGUCAGGUGU | 225 | 2078-2098 | ACACCUGACAGGCAGUGUCGUUC | 515 | 2076-2098 |
| AD-1526987 | ACACCUUUUUCACCUAACUAU | 226 | 2178-2198 | AUAGUUAGGUGAAAAAGGUGUUC | 516 | 2176-2198 |
| AD-1526988 | CACCUUUUUCACCUAACUAAU | 227 | 2179-2199 | AUUAGUTAGGUGAAAAAGGUGUU | 517 | 2177-2199 |
| AD-1526989 | ACCUUUUUCACCUAACUAAAU | 228 | 2180-2200 | AUUUAGTUAGGUGAAAAAGGUGU | 518 | 2178-2200 |
| AD-1526990 | CUUUUUCACCUAACUAAAAUU | 229 | 2182-2202 | AAUUUUAGUUAGGUGAAAAAGGU | 519 | 2180-2202 |
| AD-1526991 | UUUUUCACCUAACUAAAAUAU | 230 | 2183-2203 | AUAUUUUAGUUAGGUGAAAAAGG | 520 | 2181-2203 |
| AD-1526992 | UUUUCACCUAACUAAAAUAAU | 231 | 2184-2204 | AUUAUUUUAGUUAGGUGAAAAAG | 521 | 2182-2204 |
| AD-1526993 | UUUCACCUAACUAAAAUAAUU | 232 | 2185-2205 | AAUUAUUUUAGUUAGGUGAAAAA | 522 | 2183-2205 |
| AD-1526994 | UUCACCUAACUAAAAUAAUGU | 233 | 2186-2206 | ACAUUAUUUUAGUUAGGUGAAAA | 523 | 2184-2206 |
| AD-1526995 | UCACCUAACUAAAAUAAUGUU | 234 | 2187-2207 | AACAUUAUUUUAGUUAGGUGAAA | 524 | 2185-2207 |
| AD-1526996 | CACCUAACUAAAAUAAUGUUU | 235 | 2188-2208 | AAACAUUAUUUUAGUUAGGUGAA | 525 | 2186-2208 |
| AD-1526997 | ACCUAACUAAAAUAAUGUUUU | 236 | 2123-2143 | AAAACAUUAUUUUAGUUAGGUGA | 526 | 2121-2143 |
| AD-1526998 | CCUAACUAAAAUAAUGUUUAU | 237 | 2124-2144 | AUAAACAUUAUUUUAGUUAGGUG | 527 | 2122-2144 |
| AD-1526999 | CCUAACUAAAAUAAUGUUUAU | 237 | 2124-2144 | AUAAACAUUAUUUUAGUUAGGUG | 527 | 2122-2144 |
| AD-1527000 | CUAACUAAAAUAAUGUUUAAU | 238 | 2125-2145 | AUUAAACAUUAUUUUAGUUAGGU | 528 | 2123-2145 |
| AD-1527001 | UAACUAAAAUAAUGUUUAAAU | 239 | 2126-2146 | AUUUAAACAUUAUUUUAGUUAGG | 529 | 2124-2146 |
| AD-1527002 | AACUAAAAUAAUGUUUAAAGU | 240 | 2127-2147 | ACUUUAAACAUUAUUUUAGUUAG | 530 | 2125-2147 |
| AD-1527003 | ACUAAAAUAAUGUUUAAAGAU | 241 | 2128-2148 | AUCUUUAAACAUUAUUUUAGUUA | 531 | 2126-2148 |
| AD-1527004 | ACCUGUUGAAUUUUGUAUUAU | 242 | 2245-2265 | AUAAUACAAAAUUCAACAGGUAA | 532 | 2243-2265 |
| AD-1527005 | CCUGUUGAAUUUUGUAUUAUU | 243 | 2180-2200 | AAUAAUACAAAAUUCAACAGGUA | 533 | 2178-2200 |
| AD-1527006 | UGCGGCUUCCUGGGCUUCUAU | 244 | 216-236 | AUAGAAGCCCAGGAAGCCGCAGC | 534 | 214-236 |
| AD-1527090 | UUCCUGGGCUUCUACCACGUU | 245 | 222-242 | AACGTGGUAGAAGCCCAGGAAGC | 535 | 220-242 |
| AD-1527008 | CCCGCUGGAGCAGACUCUGCU | 246 | 353-373 | AGCAGAGUCUGCUCCAGCGGGAU | 536 | 351-373 |
| AD-1527009 | CAGACUCUGCAGGUCCUCUCU | 247 | 363-383 | AGAGAGGACCUGCAGAGUCUGCU | 537 | 361-383 |
| AD-1527010 | ACUCUGCAGGUCCUCUCAGAU | 248 | 366-386 | AUCUGAGAGGACCUGCAGAGUCU | 538 | 364-386 |
| AD-1527011 | UCUGCAGGUCCUCUCAGAUCU | 249 | 368-388 | AGAUCUGAGAGGACCUGCAGAGU | 539 | 366-388 |
| AD-1527012 | UGCAGGUCCUCUCAGAUCUUU | 32 | 370-390 | AAAGAUCUGAGAGGACCUGCAGA | 313 | 368-390 |
| AD-1527013 | CAUCUUCCAUCCAUCCUUCAU | 250 | 419-439 | AUGAAGGAUGGAUGGAAGAUGCC | 540 | 417-439 |
| AD-1527014 | AAUGUCCACCAGCUCAUCUCU | 40 | 486-506 | AGAGAUGAGCUGGUGGACAUUGG | 321 | 484-506 |
| AD-1527015 | UACAGUGGCCUUAUCCCUCCU | 251 | 624-644 | AGGAGGGAUAAGGCCACUGUAGA | 541 | 622-644 |
| AD-1527016 | CAGUGGCCUUAUCCCUCCUUU | 252 | 626-646 | AAAGGAGGGAUAAGGCCACUGUA | 542 | 624-646 |
| AD-1527017 | GUGGCCUUAUCCCUCCUUCCU | 253 | 628-648 | AGGAAGGAGGGAUAAGGCCACUG | 543 | 626-648 |
| AD-1527018 | CCCUCCUUCCUUCAGAGGCGU | 54 | 638-658 | ACGCCUCUGAAGGAAGGAGGGAU | 335 | 636-658 |
| AD-1527019 | UGAGUGACAACGUACCCUUCU | 254 | 679-699 | AGAAGGGUACGUUGUCACUCACU | 544 | 677-699 |
| AD-1527020 | GAGUGACAACGUACCCUUCAU | 255 | 680-700 | AUGAAGGGUACGUUGUCACUCAC | 545 | 678-700 |
| AD-1527021 | ACGUACCCUUCAUUGAUGCCU | 256 | 688-708 | AGGCAUCAAUGAAGGGUACGUUG | 546 | 686-708 |
| AD-1527022 | AGUACGACAUCUGCCCUAAAU | 257 | 742-762 | AUUUAGGGCAGAUGUCGUACUCC | 547 | 740-762 |
| AD-1527091 | AUCUGCCCUAAAGUCAAGUCU | 258 | 750-770 | AGACTUGACUUUAGGGCAGAUGU | 548 | 748-770 |
| AD-1527024 | CUCUGCACAGGGAACCUCUAU | 259 | 813-833 | AUAGAGGUUCCCUGUGCAGAGGC | 549 | 811-833 |
| AD-1527025 | UCUGCACAGGGAACCUCUACU | 260 | 814-834 | AGUAGAGGUUCCCUGUGCAGAGG | 550 | 812-834 |
| AD-1527026 | ACAGGGAACCUCUACCUUCUU | 261 | 819-839 | AAGAAGGUAGAGGUUCCCUGUGC | 551 | 817-839 |
| AD-1527027 | CUGGGAGAGAUAUGCCUUCGU | 262 | 873-893 | ACGAAGGCAUAUCUCUCCCAGCA | 552 | 871-893 |
| AD-1527028 | UGGGAGAGAUAUGCCUUCGAU | 99 | 874-894 | AUCGAAGGCAUAUCUCUCCCAGC | 383 | 872-894 |
| AD-1527029 | AGAGAUAUGCCUUCGAGGAUU | 263 | 878-898 | AAUCCUCGAAGGCAUAUCUCUCC | 553 | 876-898 |
| AD-1527092 | AGAUAUGCCUUCGAGGAUAUU | 264 | 880-900 | AAUATCCUCGAAGGCAUAUCUCU | 554 | 878-900 |
| AD-1527031 | GAUAUGCCUUCGAGGAUAUUU | 104 | 881-901 | AAAUAUCCUCGAAGGCAUAUCUC | 388 | 879-901 |
| AD-1527032 | GAAGAGAAGGGCAUCUGCAAU | 265 | 921-941 | AUUGCAGAUGCCCUUCUCUUCCA | 555 | 919-941 |
| AD-1527033 | GAGCUGCUAGACCACCUGCGU | 266 | 1071-1091 | ACGCAGGUGGUCUAGCAGCUCAU | 556 | 1069-1091 |
| AD-1527034 | GACCACCUGCGUCUCAGCAUU | 267 | 1080-1100 | AAUGCUGAGACGCAGGUGGUCUA | 557 | 1078-1100 |
| AD-1527035 | CACCUGCGUCUCAGCAUCCUU | 268 | 1083-1103 | AAGGAUGCUGAGACGCAGGUGGU | 558 | 1081-1103 |
| AD-1527036 | CCCUGGGAUGAGAGCAUCCUU | 269 | 1104-1124 | AAGGAUGCUCUCAUCCCAGGGCA | 559 | 1102-1124 |
| AD-1527093 | AGGUGGAUACAUGAGCAAGAU | 270 | 1178-1198 | AUCUTGCUCAUGUAUCCACCUUU | 560 | 1176-1198 |
| AD-1527094 | GGUGGAUACAUGAGCAAGAUU | 271 | 1179-1199 | AAUCTUGCUCAUGUAUCCACCUU | 561 | 1177-1199 |
| AD-1527095 | CAUGAGCAAGAUUUGCAACUU | 272 | 1187-1207 | AAGUTGCAAAUCUUGCUCAUGUA | 562 | 1185-1207 |
| AD-1527096 | AUGAGCAAGAUUUGCAACUUU | 273 | 1188-1208 | AAAGTUGCAAAUCUUGCUCAUGU | 563 | 1186-1208 |
| AD-1527041 | UUUGCAACUUGCUACCCAUUU | 274 | 1198-1218 | AAAUGGGUAGCAAGUUGCAAAUC | 564 | 1196-1218 |
| AD-1527042 | AUGCUGCCCUGUACCCUGCCU | 275 | 1236-1256 | AGGCAGGGUACAGGGCAGCAUUA | 565 | 1234-1256 |
| AD-1527097 | GCCAUUGCGAUUGUCCAGAGU | 276 | 1266-1286 | ACUCTGGACAAUCGCAAUGGCAG | 566 | 1264-1286 |
| AD-1527044 | CCAUUGCGAUUGUCCAGAGAU | 277 | 1267-1287 | AUCUCUGGACAAUCGCAAUGGCA | 567 | 1265-1287 |
| AD-1527045 | AUUGCGAUUGUCCAGAGACUU | 278 | 1269-1289 | AAGUCUCUGGACAAUCGCAAUGG | 568 | 1267-1289 |
| AD-1527046 | CCAGAGACUGGUGACAUGGCU | 279 | 1280-1300 | AGCCAUGUCACCAGUCUCUGGAC | 569 | 1278-1300 |
| AD-1527047 | GACUGGUGACAUGGCUUCCAU | 280 | 1285-1305 | AUGGAAGCCAUGUCACCAGUCUC | 570 | 1283-1305 |
| AD-1527098 | UGGUGACAUGGCUUCCAGAUU | 281 | 1288-1308 | AAUCTGGAAGCCAUGUCACCAGU | 571 | 1286-1308 |
| AD-1527049 | GGUGACAUGGCUUCCAGAUAU | 282 | 1289-1309 | AUAUCUGGAAGCCAUGUCACCAG | 572 | 1287-1309 |
| AD-1527050 | UGGCUUCCAGAUAUGCCCGAU | 283 | 1296-1316 | AUCGGGCAUAUCUGGAAGCCAUG | 573 | 1294-1316 |
| AD-1527051 | GGCUUCCAGAUAUGCCCGACU | 284 | 1297-1317 | AGUCGGGCAUAUCUGGAAGCCAU | 574 | 1295-1317 |
| AD-1527052 | GUUGCAGUGGGUGACCUCACU | 285 | 1328-1348 | AGUGAGGUCACCCACUGCAACCA | 575 | 1326-1348 |
| AD-1527099 | CCAGGUCCCAAAUGCCAGUGU | 286 | 1387-1407 | ACACTGGCAUUUGGGACCUGGAG | 576 | 1385-1407 |
| AD-1527054 | AGGUCCAGCCUGAACUUCUUU | 184 | 1524-1544 | AAAGAAGUUCAGGCUGGACCUGA | 472 | 1522-1544 |
| AD-1527100 | GCUCUCCACCUUUCCCAGUUU | 287 | 1577-1597 | AAACTGGGAAAGGUGGAGAGCCC | 577 | 1575-1597 |
| AD-1527056 | AUUCUUUCAGAGGUGCUAAAU | 288 | 1646-1666 | AUUUAGCACCUCUGAAAGAAUCU | 578 | 1644-1666 |
| AD-1527057 | UUCCCAUCUUUGUGCAGCUAU | 289 | 1668-1688 | AUAGCUGCACAAAGAUGGGAAAC | 579 | 1666-1688 |
| AD-1527058 | UGUGCAGCUACCUCCGCAUUU | 194 | 1678-1698 | AAAUGCGGAGGUAGCUGCACAAA | 482 | 1676-1698 |
| AD-1527059 | GACGUGGAGGAUCCCAGCCUU | 290 | 1721-1741 | AAGGCUGGGAUCCUCCACGUCAC | 580 | 1719-1741 |
| AD-1527060 | UGGAGGAUCCCAGCCUCUGAU | 291 | 1725-1745 | AUCAGAGGCUGGGAUCCUCCACG | 581 | 1723-1745 |
| AD-1527061 | CUCUGAGCUGAGUUGGUUUUU | 201 | 1739-1759 | AAAAACCAACUCAGCUCAGAGGC | 489 | 1737-1759 |
| AD-1527101 | UGAGUUGGUUUUAUGAAAAGU | 292 | 1747-1767 | ACUUTUCAUAAAACCAACUCAGC | 582 | 1745-1767 |
| AD-1527102 | GGUUUUAUGAAAAGCUAGGAU | 293 | 1753-1773 | AUCCTAGCUUUUCAUAAAACCAA | 583 | 1751-1773 |
| AD-1527103 | UUUAUGAAAAGCUAGGAAGCU | 294 | 1756-1776 | AGCUTCCUAGCUUUUCAUAAAAC | 584 | 1754-1776 |
| AD-1527104 | UUAUGAAAAGCUAGGAAGCAU | 295 | 1757-1777 | AUGCTUCCUAGCUUUUCAUAAAA | 585 | 1755-1777 |
| AD-1527105 | AAUUCAGCUGGUUGGGAAAUU | 296 | 1831-1851 | AAUUTCCCAACCAGCUGAAUUAA | 586 | 1829-1851 |
| AD-1527067 | CAGAGGGUCCCUUACUGACUU | 297 | 1870-1890 | AAGUCAGUAAGGGACCCUCUGCA | 587 | 1868-1890 |
| AD-1527068 | UAUUAAUGGUCAGACUGUUCU | 298 | 1902-1922 | AGAACAGUCUGACCAUUAAUAGG | 588 | 1900-1922 |
| AD-1527106 | AACACCUUUUUCACCUAACUU | 299 | 2177-2197 | AAGUTAGGUGAAAAAGGUGUUCU | 589 | 2175-2197 |
| AD-1527107 | CCUUUUUCACCUAACUAAAAU | 300 | 2181-2201 | AUUUTAGUUAGGUGAAAAAGGUG | 590 | 2179-2201 |
| AD-1527108 | ACCUGUUGAAUUUUGUAUUAU | 242 | 2245-2265 | AUAATACAAAAUUCAACAGGUAA | 591 | 2243-2265 |

TABLE 3
Modified Sense and Antisense Sequences of PNPLA3 dsRNA Agents

| Duple Name | Sense Sequence 5′ to 3′ | SEQ ID NO: | Antisense Sequence 5′ to 3′ | SEQ ID NO: | mRNA target sequence | SEQ ID NO: |
|---|---|---|---|---|---|---|
| AD-1526763 | csgscggcUfgGfAfGfcuuguccuuuL96 | 592 | asAfsaggAfcaagcucCfaGfccgcgscsu | 873 | AGCGCGGCUGGAGCUUGUCCUUC | 1182 |
| AD-1526764 | gscsggcuUfcCfUfGfggcuucuacuL96 | 593 | asGfsuadGa(Agn)gcccagGfaAfgccgcsasg | 874 | CUGCGGCUUCCUGGGCUUCUACC | 1183 |
| AD-1526765 | csgsgcuuCfcUfGfGfgcuucuaccuL96 | 594 | asGfsguaGfaagcccaGfgAfagccgscsa | 875 | UGCGGCUUCCUGGGCUUCUACCA | 1184 |
| AD-1526766 | csgsgcuuCfcUfGfGfgcuucuaccuL96 | 594 | asGfsgudAg(Agn)agcccaGfgAfagccgscsa | 876 | UGCGGCUUCCUGGGCUUCUACCA | 1184 |
| AD-1526767 | csusuccuGfgGfCfUfucuaccacguL96 | 595 | asCfsgudGg(Tgn)agaagcCfcAfggaagscsc | 877 | GGCUUCCUGGGCUUCUACCACGU | 1185 |
| AD-1526768 | cscsugggCfuUfCfUfaccacgucguL96 | 596 | asCfsgacGfugguagaAfgCfccaggsasa | 878 | UUCCUGGGCUUCUACCACGUCGG | 1186 |
| AD-1526769 | csusgggcUfuCfUfAfccacgucgguL96 | 597 | asCfscgaCfgugguagAfaGfcccagsgsa | 879 | UCCUGGGCUUCUACCACGUCGGG | 1187 |
| AD-1526770 | csgscgacGfcGfCfGfcauguuguuuL96 | 598 | asAfsacaAfcaugcgcGfcGfucgcgsgsa | 880 | UCCGCGACGCGCGCAUGUUGUUC | 1188 |
| AD-1526771 | cscsgcugGfaGfCfAfgacucugcauL96 | 599 | asUfsgcdAg(Agn)gucugcUfcCfagcggsgsa | 881 | UCCCGCUGGAGCAGACUCUGCAG | 1189 |
| AD-1526772 | gsgsagcaGfaCfUfCfugcagguccuL96 | 600 | asGfsgadCc(Tgn)gcagagUfcUfgcuccsasg | 882 | CUGGAGCAGACUCUGCAGGUCCU | 1190 |
| AD-1526773 | gsascucuGfcAfGfGfuccucucaguL96 | 601 | asCfsugaGfaggaccuGfcAfgagucsusg | 883 | CAGACUCUGCAGGUCCUCUCAGA | 1191 |
| AD-1527072 | csuscugcAfgGfUfCfcucucagauuL96 | 602 | asAfsucdTg(Agn)gaggacCfuGfcagagsusc | 884 | GACUCUGCAGGUCCUCUCAGAUC | 1192 |
| AD-1527073 | csusgcagGfuCfCfUfcucagaucuuL96 | 603 | asAfsgadTc(Tgn)gagaggAfcCfugcagsasg | 885 | CUCUGCAGGUCCUCUCAGAUCUU | 1193 |
| AD-1526776 | usgscaggUfcCfUfCfucagaucuuuL96 | 604 | asAfsagaUfcugagagGfaCfcugcasgsa | 886 | UCUGCAGGUCCUCUCAGAUCUUG | 1194 |
| AD-1526777 | gscsagguCfcUfCfUfcagaucuuguL96 | 605 | asCfsaagAfucugagaGfgAfccugcsasg | 887 | CUGCAGGUCCUCUCAGAUCUUGU | 1195 |
| AD-1526778 | asgsgccaGfgAfGfUfcggaacauuuL96 | 606 | asAfsaudGu(Tgn)ccgacuCfcUfggccususc | 888 | GAAGGCCAGGAGUCGGAACAUUG | 1196 |
| AD-1527074 | gsgsccagGfaGfUfCfggaacauuguL96 | 607 | asCfsaadTg(Tgn)uccgacUfcCfuggccsusu | 889 | AAGGCCAGGAGUCGGAACAUUGG | 1197 |
| AD-1526780 | gscscaggAfgUfCfGfgaacauugguL96 | 608 | asCfscaaUfguuccgaCfuCfcuggescsu | 890 | AGGCCAGGAGUCGGAACAUUGGC | 1198 |
| AD-1526781 | gscsaucuUfcCfAfUfccauccuucuL96 | 609 | asGfsaadGg(Agn)uggaugGfaAfgaugescsa | 891 | UGGCAUCUUCCAUCCAUCCUUCA | 1199 |
| AD-1526782 | usgsccucCfcGfGfCfcaauguccauL96 | 610 | asUfsggdAc(Agn)uuggccGfgGfaggcasusu | 892 | AAUGCCUCCCGGCCAAUGUCCAC | 1200 |
| AD-1527075 | csasauguCfcAfCfCfagcucaucuuL96 | 611 | asAfsgadTg(Agn)gcugguGfgAfcauugsgsc | 893 | GCCAAUGUCCACCAGCUCAUCUC | 1201 |
| AD-1526784 | asasugucCfaCfCfAfgcucaucucuL96 | 612 | asGfsagaUfgagcuggUfgGfacauusgsg | 894 | CCAAUGUCCACCAGCUCAUCUCC | 1202 |
| AD-1526785 | gsusccaaAfgAfCfGfaagucgugguL96 | 613 | asCfscacGfacuucguCfuUfuggacscsg | 895 | CGGUCCAAAGACGAAGUCGUGGA | 1203 |
| AD-1526786 | uscscaaaGfaCfGfAfagucguggauL96 | 614 | asUfsccaCfgacuucgUfcUfuuggascsc | 896 | GGUCCAAAGACGAAGUCGUGGAU | 1204 |
| AD-1526787 | cscsaaagAfcGfAfAfgucguggauuL96 | 615 | asAfsuccAfcgacuucGfuCfuuuggsasc | 897 | GUCCAAAGACGAAGUCGUGGAUG | 1205 |
| AD-1526788 | csasaagaCfgAfAfGfucguggauguL96 | 616 | asCfsaucCfacgacuuCfgUfcuuugsgsa | 898 | UCCAAAGACGAAGUCGUGGAUGC | 1206 |
| AD-1526789 | asgsacgaAfgUfCfGfuggaugccuuL96 | 617 | asAfsggdCa(Tgn)ccacgaCfuUfcgucususu | 899 | AAAGACGAAGUCGUGGAUGCCUU | 1207 |
| AD-1526790 | csusucuaCfaGfUfGfgccuuauccuL96 | 618 | asGfsgauAfaggccacUfgUfagaagsgsg | 900 | CCCUUCUACAGUGGCCUUAUCCC | 1208 |
| AD-1526791 | ususcuacAfgUfGfGfccuuaucccuL96 | 619 | asGfsggaUfaaggccaCfuGfuagaasgsg | 901 | CCUUCUACAGUGGCCUUAUCCCU | 1209 |
| AD-1526792 | uscsuacaGfuGfGfCfcuuaucccuuL96 | 620 | asAfsgggAfuaaggccAfcUfguagasasg | 902 | CUUCUACAGUGGCCUUAUCCCUC | 1210 |
| AD-1526793 | csusacagUfgGfCfCfuuaucccucuL96 | 621 | asGfsagdGg(Agn)uaaggcCfaCfuguagsasa | 903 | UUCUACAGUGGCCUUAUCCCUCC | 1211 |
| AD-1526794 | asgsuggcCfuUfAfUfcccuccuucuL96 | 622 | asGfsaadGg(Agn)gggauaAfgGfccacusgsu | 904 | ACAGUGGCCUUAUCCCUCCUUCC | 1212 |
| AD-1526795 | usgsgccuUfaUfCfCfcuccuuccuuL96 | 623 | asAfsggaAfggagggaUfaAfggccascsu | 905 | AGUGGCCUUAUCCCUCCUUCCUU | 1213 |
| AD-1526796 | csusuaucCfcUfCfCfuuccuucaguL96 | 624 | asCfsugaAfggaaggaGfgGfauaagsgsc | 906 | GCCUUAUCCCUCCUUCCUUCAGA | 1214 |
| AD-1526797 | ususauccCfuCfCfUfuccuucagauL96 | 625 | asUfscudGa(Agn)ggaaggAfgGfgauaasgsg | 907 | CCUUAUCCCUCCUUCCUUCAGAG | 1215 |
| AD-1526798 | cscscuccUfuCfCfUfucagaggcguL96 | 626 | asCfsgccUfcugaaggAfaGfgagggsasu | 908 | AUCCCUCCUUCCUUCAGAGGCGU | 1216 |
| AD-1526799 | cscsuccuUfcCfUfUfcagaggcguuL96 | 627 | asAfscgcCfucugaagGfaAfggaggsgsa | 909 | UCCCUCCUUCCUUCAGAGGCGUG | 1217 |
| AD-1526800 | cscsuccuUfcCfUfUfcagaggcguuL96 | 627 | asAfscgdCc(Tgn)cugaagGfaAfggaggsgsa | 910 | UCCCUCCUUCCUUCAGAGGCGUG | 1217 |
| AD-1526801 | cscsuuccUfuCfAfGfaggcgugcguL96 | 628 | asCfsgcaCfgccucugAfaGfgaaggsasg | 911 | CUCCUUCCUUCAGAGGCGUGCGA | 1218 |
| AD-1526802 | uscscuucAfgAfGfGfcgugcgauauL96 | 629 | asUfsaucGfcacgccuCfuGfaaggasasg | 912 | CUUCCUUCAGAGGCGUGCGAUAU | 1219 |
| AD-1526803 | csusucagAfgGfCfGfugcgauauguL96 | 630 | asCfsauaUfcgcacgcCfuCfugaagsgsa | 913 | UCCUUCAGAGGCGUGCGAUAUGU | 1220 |
| AD-1526804 | ususcagaGfgCfGfUfgcgauauguuL96 | 631 | asAfscauAfucgcacgCfcUfcugaasgsg | 914 | CCUUCAGAGGCGUGCGAUAUGUG | 1221 |
| AD-1526805 | uscsagagGfcGfUfGfcgauauguguL96 | 632 | asCfsacaUfaucgcacGfcCfucugasasg | 915 | CUUCAGAGGCGUGCGAUAUGUGG | 1222 |
| AD-1526806 | csasgaggCfgUfGfCfgauaugugguL96 | 633 | asCfscacAfuaucgcaCfgCfcucugsasa | 916 | UUCAGAGGCGUGCGAUAUGUGGA | 1223 |
| AD-1526807 | asgsaggcGfuGfCfGfauauguggauL96 | 634 | asUfsccaCfauaucgcAfcGfccucusgsa | 917 | UCAGAGGCGUGCGAUAUGUGGAU | 1224 |
| AD-1526808 | asgsgcguGfcGfAfUfauguggauguL96 | 635 | asCfsaucCfacauaucGfcAfegccuscsu | 918 | AGAGGCGUGCGAUAUGUGGAUGG | 1225 |
| AD-1526809 | gsgscgugCfgAfUfAfuguggaugguL96 | 636 | asCfscauCfcacauauCfgCfacgccsusc | 919 | GAGGCGUGCGAUAUGUGGAUGGA | 1226 |
| AD-1526810 | csgsugcgAfuAfUfGfuggauggaguL96 | 637 | asCfsuccAfuccacauAfuCfgcacgscsc | 920 | GGCGUGCGAUAUGUGGAUGGAGG | 1227 |
| AD-1526811 | gsusgcgaUfaUfGfUfggauggagguL96 | 638 | asCfscucCfauccacaUfaUfcgcacsgsc | 921 | GCGUGCGAUAUGUGGAUGGAGGA | 1228 |
| AD-1526812 | gsusgaguGfaCfAfAfcguacccuuuL96 | 639 | asAfsagdGg(Tgn)acguugUfcAfcucacsusc | 922 | GAGUGAGUGACAACGUACCCUUC | 1229 |
| AD-1526813 | asgsugacAfaCfGfUfacccuucauuL96 | 640 | asAfsugaAfggguacgUfuGfucacuscsa | 923 | UGAGUGACAACGUACCCUUCAUU | 1230 |
| AD-1526814 | gsusgacaAfcGfUfAfcccuucauuuL96 | 641 | asAfsaugAfaggguacGfuUfgucacsusc | 924 | GAGUGACAACGUACCCUUCAUUG | 1231 |
| AD-1526815 | usgsacaaCfgUfAfCfccuucauuguL96 | 642 | asCfsaauGfaaggguaCfgUfugucascsu | 925 | AGUGACAACGUACCCUUCAUUGA | 1232 |
| AD-1526816 | gsascaacGfuAfCfCfcuucauugauL96 | 643 | asUfscaaUfgaaggguAfcGfuugucsasc | 926 | GUGACAACGUACCCUUCAUUGAU | 1233 |
| AD-1526817 | ascsaacgUfaCfCfCfuucauugauuL96 | 644 | asAfsucaAfugaagggUfaCfguuguscsa | 927 | UGACAACGUACCCUUCAUUGAUG | 1234 |
| AD-1526818 | csasacguAfcCfCfUfucauugauguL96 | 645 | asCfsaucAfaugaaggGfuAfcguugsusc | 928 | GACAACGUACCCUUCAUUGAUGC | 1235 |
| AD-1526819 | asascguaCfcCfUfUfcauugaugcuL96 | 646 | asGfscauCfaaugaagGfgUfacguusgsu | 929 | ACAACGUACCCUUCAUUGAUGCC | 1236 |
| AD-1526820 | csgsuaccCfuUfCfAfuugaugccauL96 | 647 | asUfsggdCa(Tgn)caaugaAfgGfguacgsusu | 930 | AACGUACCCUUCAUUGAUGCCAA | 1237 |
| AD-1526821 | gsusacccUfuCfAfUfugaugccaauL96 | 648 | asUfsugdGc(Agn)ucaaugAfaGfgguacsgsu | 931 | ACGUACCCUUCAUUGAUGCCAAA | 1238 |
| AD-1526822 | usascgacAfuCfUfGfcccuaaaguuL96 | 649 | asAfscuuUfagggcagAfuGfucguascsu | 932 | AGUACGACAUCUGCCCUAAAGUC | 1239 |
| AD-1526823 | csgsacauCfuGfCfCfcuaaagucauL96 | 650 | asUfsgacUfuuagggcAfgAfugucgsusa | 933 | UACGACAUCUGCCCUAAAGUCAA | 1240 |
| AD-1526824 | gsascaucUfgCfCfCfuaaagucaauL96 | 651 | asUfsugdAc(Tgn)uuagggCfaGfaugucsgsu | 934 | ACGACAUCUGCCCUAAAGUCAAG | 1241 |
| AD-1526825 | ascsaucuGfcCfCfUfaaagucaaguL96 | 652 | asCfsuugAfcuuuaggGfcAfgauguscsg | 935 | CGACAUCUGCCCUAAAGUCAAGU | 1242 |
| AD-1526826 | uscsugccCfuAfAfAfgucaaguccuL96 | 653 | asGfsgacUfugacuuuAfgGfgcagasusg | 936 | CAUCUGCCCUAAAGUCAAGUCCA | 1243 |
| AD-1526827 | uscsugccCfuAfAfAfgucaaguccuL96 | 653 | asGfsgadCu(Tgn)gacuuuAfgGfgcagasusg | 937 | CAUCUGCCCUAAAGUCAAGUCCA | 1243 |
| AD-1526828 | csusgcccUfaAfAfGfucaaguccauL96 | 654 | asUfsggdAc(Tgn)ugacuuUfaGfggcagsasu | 938 | AUCUGCCCUAAAGUCAAGUCCAC | 1244 |
| AD-1526829 | asusguggAfcAfUfCfaccaagcucuL96 | 655 | asGfsagcUfuggugauGfuCfcacausgsa | 939 | UCAUGUGGACAUCACCAAGCUCA | 1245 |
| AD-1526830 | asusguggAfcAfUfCfaccaagcucuL96 | 655 | asGfsagdCu(Tgn)ggugauGfuCfcacausgsa | 940 | UCAUGUGGACAUCACCAAGCUCA | 1245 |
| AD-1526831 | usgsuggaCfaUfCfAfccaagcucauL96 | 656 | asUfsgadGc(Tgn)uggugaUfgUfccacasusg | 941 | CAUGUGGACAUCACCAAGCUCAG | 1246 |
| AD-1527076 | gsuscuacGfcCfUfCfugcacaggguL96 | 657 | asCfsccdTg(Tgn)gcagagGfcGfuagacsusg | 942 | CAGUCUACGCCUCUGCACAGGGA | 1247 |
| AD-1526833 | cscsucugCfaCfAfGfggaaccucuuL96 | 658 | asAfsgadGg(Tgn)ucccugUfgCfagaggscsg | 943 | CGCCUCUGCACAGGGAACCUCUA | 1248 |
| AD-1526834 | usgscacaGfgGfAfAfccucuaccuuL96 | 659 | asAfsgguAfgagguucCfcUfgugcasgsa | 944 | UCUGCACAGGGAACCUCUACCUU | 1249 |
| AD-1526835 | gscsacagGfgAfAfCfcucuaccuuuL96 | 660 | asAfsaggUfagagguuCfcCfugugcsasg | 945 | CUGCACAGGGAACCUCUACCUUC | 1250 |
| AD-1526836 | csascaggGfaAfCfCfucuaccuucuL96 | 661 | asGfsaadGg(Tgn)agagguUfcCfcugugscsa | 946 | UGCACAGGGAACCUCUACCUUCU | 1251 |
| AD-1526837 | csasgggaAfcCfUfCfuaccuucucuL96 | 662 | asGfsagaAfgguagagGfuUfcccugsusg | 947 | CACAGGGAACCUCUACCUUCUCU | 1252 |
| AD-1526838 | asgsggaaCfcUfCfUfaccuucucuuL96 | 663 | asAfsgagAfagguagaGfgUfucccusgsu | 948 | ACAGGGAACCUCUACCUUCUCUC | 1253 |
| AD-1526839 | gsgsgaacCfuCfUfAfccuucucucuL96 | 664 | asGfsagaGfaagguagAfgGfuucccsusg | 949 | CAGGGAACCUCUACCUUCUCUCG | 1254 |
| AD-1527077 | csasagguGfcUfGfGfgagagauauuL96 | 665 | asAfsuadTc(Tgn)cucccaGfcAfccuugsasg | 950 | CUCAAGGUGCUGGGAGAGAUAUG | 1255 |
| AD-1526841 | asasggugCfuGfGfGfagagauauguL96 | 666 | asCfsauaUfcucucccAfgCfaccuusgsa | 951 | UCAAGGUGCUGGGAGAGAUAUGC | 1256 |
| AD-1526842 | asgsgugcUfgGfGfAfgagauaugcuL96 | 667 | asGfscauAfucucuccCfaGfcaccususg | 952 | CAAGGUGCUGGGAGAGAUAUGCC | 1257 |
| AD-1526843 | gsgsugcuGfgGfAfGfagauaugccuL96 | 668 | asGfsgcaUfaucucucCfcAfgcaccsusu | 953 | AAGGUGCUGGGAGAGAUAUGCCU | 1258 |
| AD-1526844 | gsusgcugGfgAfGfAfgauaugccuuL96 | 669 | asAfsggdCa(Tgn)aucucuCfcCfagcacscsu | 954 | AGGUGCUGGGAGAGAUAUGCCUU | 1259 |
| AD-1526845 | usgscuggGfaGfAfGfauaugccuuuL96 | 670 | asAfsagdGc(Agn)uaucucUfcCfcagcascsc | 955 | GGUGCUGGGAGAGAUAUGCCUUC | 1260 |
| AD-1526846 | usgsggagAfgAfUfAfugccuucgauL96 | 671 | asUfscgaAfggcauauCfuCfucccasgsc | 956 | GCUGGGAGAGAUAUGCCUUCGAG | 1261 |
| AD-1526847 | gsgsgagaGfaUfAfUfgccuucgaguL96 | 672 | asCfsucgAfaggcauaUfcUfcucccsasg | 957 | CUGGGAGAGAUAUGCCUUCGAGG | 1262 |
| AD-1526848 | gsgsagagAfuAfUfGfccuucgagguL96 | 673 | asCfscucGfaaggcauAfuCfucuccscsa | 958 | UGGGAGAGAUAUGCCUUCGAGGA | 1263 |
| AD-1526849 | gsasgagaUfaUfGfCfcuucgaggauL96 | 674 | asUfsccuCfgaaggcaUfaUfcucucscsc | 959 | GGGAGAGAUAUGCCUUCGAGGAU | 1264 |
| AD-1526850 | gsasgauaUfgCfCfUfucgaggauauL96 | 675 | asUfsaudCc(Tgn)cgaaggCfaUfaucucsusc | 960 | GAGAGAUAUGCCUUCGAGGAUAU | 1265 |
| AD-1526851 | gsasuaugCfcUfUfCfgaggauauuuL96 | 676 | asAfsauaUfccucgaaGfgCfauaucsusc | 961 | GAGAUAUGCCUUCGAGGAUAUUU | 1266 |
| AD-1526852 | asusaugcCfuUfCfGfaggauauuuuL96 | 677 | asAfsaauAfuccucgaAfgGfcauauscsu | 962 | AGAUAUGCCUUCGAGGAUAUUUG | 1267 |
| AD-1526853 | usasugccUfuCfGfAfggauauuuguL96 | 678 | asCfsaaaUfauccucgAfaGfgcauasusc | 963 | GAUAUGCCUUCGAGGAUAUUUGG | 1268 |
| AD-1526854 | asusgccuUfcGfAfGfgauauuugguL96 | 679 | asCfscaaAfuauccucGfaAfggcausasu | 964 | AUAUGCCUUCGAGGAUAUUUGGA | 1269 |
| AD-1526855 | usgsccuuCfgAfGfGfauauuuggauL96 | 680 | asUfsccaAfauauccuCfgAfaggcasusa | 965 | UAUGCCUUCGAGGAUAUUUGGAU | 1270 |
| AD-1526856 | csasuucaGfgUfUfCfuuggaagaguL96 | 681 | asCfsucuUfccaagaaCfcUfgaaugscsa | 966 | UGCAUUCAGGUUCUUGGAAGAGA | 1271 |
| AD-1526857 | asgsguucUfuGfGfAfagagaaggguL96 | 682 | asCfsccuUfcucuuccAfaGfaaccusgsa | 967 | UCAGGUUCUUGGAAGAGAAGGGC | 1272 |
| AD-1526858 | gsgsuucuUfgGfAfAfgagaagggcuL96 | 683 | asGfscccUfucucuucCfaAfgaaccsusg | 968 | CAGGUUCUUGGAAGAGAAGGGCA | 1273 |
| AD-1526859 | gsgsuucuUfgGfAfAfgagaagggcuL96 | 683 | asGfsccdCu(Tgn)cucuucCfaAfgaaccsusg | 969 | CAGGUUCUUGGAAGAGAAGGGCA | 1273 |
| AD-1526860 | gsusucuuGfgAfAfGfagaagggcauL96 | 684 | asUfsgcdCc(Tgn)ucucuuCfcAfagaacscsu | 970 | AGGUUCUUGGAAGAGAAGGGCAU | 1274 |
| AD-1526861 | asasgagaAfgGfGfCfaucugcaacuL96 | 685 | asGfsuudGc(Agn)gaugccCfuUfcucuuscsc | 971 | GGAAGAGAAGGGCAUCUGCAACA | 1275 |
| AD-1527078 | gscscugaAfgUfCfAfuccucagaauL96 | 686 | asUfsucdTg(Agn)ggaugaCfuUfcaggcscsu | 972 | AGGCCUGAAGUCAUCCUCAGAAG | 1276 |
| AD-1526863 | csusgaagUfcAfUfCfcucagaagguL96 | 687 | asCfscuuCfugaggauGfaCfuucagsgsc | 973 | GCCUGAAGUCAUCCUCAGAAGGG | 1277 |
| AD-1526864 | usgsaaguCfaUfCfCfucagaaggguL96 | 688 | asCfsccuUfcugaggaUfgAfcuucasgsg | 974 | CCUGAAGUCAUCCUCAGAAGGGA | 1278 |
| AD-1526865 | gsasagucAfuCfCfUfcagaagggauL96 | 689 | asUfscccUfucugaggAfuGfacuucsasg | 975 | CUGAAGUCAUCCUCAGAAGGGAU | 1279 |
| AD-1526866 | asasgucaUfcCfUfCfagaagggauuL96 | 690 | asAfsuccCfuucugagGfaUfgacuuscsa | 976 | UGAAGUCAUCCUCAGAAGGGAUG | 1280 |
| AD-1526867 | asasgucaUfcCfUfCfagaagggauuL96 | 690 | asAfsucdCc(Tgn)ucugagGfaUfgacuuscsa | 977 | UGAAGUCAUCCUCAGAAGGGAUG | 1280 |
| AD-1526868 | asgsucauCfcUfCfAfgaagggauguL96 | 691 | asCfsaucCfcuucugaGfgAfugacususc | 978 | GAAGUCAUCCUCAGAAGGGAUGG | 1281 |
| AD-1526869 | uscsauccUfcAfGfAfagggauggauL96 | 692 | asUfsccaUfcccuucuGfaGfgaugascsu | 979 | AGUCAUCCUCAGAAGGGAUGGAU | 1282 |
| AD-1526870 | gsgsgagaUfgAfGfCfugcuagaccuL96 | 693 | asGfsgudCu(Agn)gcagcuCfaUfcucccsusc | 980 | GAGGGAGAUGAGCUGCUAGACCA | 1283 |
| AD-1527079 | gsgsagauGfaGfCfUfgcuagaccauL96 | 694 | asUfsggdTc(Tgn)agcagcUfcAfucuccscsu | 981 | AGGGAGAUGAGCUGCUAGACCAC | 1284 |
| AD-1526872 | asgsaugaGfcUfGfCfuagaccaccuL96 | 695 | asGfsgudGg(Tgn)cuagcaGfcUfcaucuscsc | 982 | GGAGAUGAGCUGCUAGACCACCU | 1285 |
| AD-1526873 | csusgcuaGfaCfCfAfccugcgucuuL96 | 696 | asAfsgacGfcagguggUfcUfagcagscsu | 983 | AGCUGCUAGACCACCUGCGUCUC | 1286 |
| AD-1526874 | csusagacCfaCfCfUfgcgucucaguL96 | 697 | asCfsugaGfacgcaggUfgGfucuagscsa | 984 | UGCUAGACCACCUGCGUCUCAGC | 1287 |
| AD-1526875 | csusagacCfaCfCfUfgcgucucaguL96 | 697 | asCfsugdAg(Agn)cgcaggUfgGfucuagscsa | 985 | UGCUAGACCACCUGCGUCUCAGC | 1287 |
| AD-1526876 | ascscaccUfgCfGfUfcucagcaucuL96 | 698 | asGfsaudGc(Tgn)gagacgCfaGfgugguscsu | 986 | AGACCACCUGCGUCUCAGCAUCC | 1288 |
| AD-1526877 | gscsgucuCfaGfCfAfuccugcccuuL96 | 699 | asAfsggdGc(Agn)ggaugcUfgAfgacgcsasg | 987 | CUGCGUCUCAGCAUCCUGCCCUG | 1289 |
| AD-1526878 | gscsauccUfgCfCfCfugggaugaguL96 | 700 | asCfsucaUfcccagggCfaGfgaugcsusg | 988 | CAGCAUCCUGCCCUGGGAUGAGA | 1290 |
| AD-1526879 | csasuccuGfcCfCfUfgggaugagauL96 | 701 | asUfscudCa(Tgn)cccaggGfcAfggaugscsu | 989 | AGCAUCCUGCCCUGGGAUGAGAG | 1291 |
| AD-1527080 | asusccugCfcCfUfGfggaugagaguL96 | 702 | asCfsucdTc(Agn)ucccagGfgCfaggausgsc | 990 | GCAUCCUGCCCUGGGAUGAGAGC | 1292 |
| AD-1526881 | usgscccuGfgGfAfUfgagagcaucuL96 | 703 | asGfsaudGc(Tgn)cucaucCfcAfgggcasgsg | 991 | CCUGCCCUGGGAUGAGAGCAUCC | 1293 |
| AD-1526882 | cscsugggAfuGfAfGfagcauccuguL96 | 704 | asCfsaggAfugcucucAfuCfccaggsgsc | 992 | GCCCUGGGAUGAGAGCAUCCUGG | 1294 |
| AD-1526883 | asasugaaAfgAfCfAfaagguggauuL96 | 705 | asAfsuccAfccuuuguCfuUfucauususc | 993 | GAAAUGAAAGACAAAGGUGGAUA | 1295 |
| AD-1526884 | asusgaaaGfaCfAfAfagguggauauL96 | 706 | asUfsaudCc(Agn)ccuuugUfcUfuucaususu | 994 | AAAUGAAAGACAAAGGUGGAUAC | 1296 |
| AD-1527081 | asgsacaaAfgGfUfGfgauacaugauL96 | 707 | asUfscadTg(Tgn)auccacCfuUfugucususu | 995 | AAAGACAAAGGUGGAUACAUGAG | 1297 |
| AD-1526886 | ascsaaagGfuGfGfAfuacaugagcuL96 | 708 | asGfscucAfuguauccAfcCfuuuguscsu | 996 | AGACAAAGGUGGAUACAUGAGCA | 1298 |
| AD-1527082 | csasaaggUfgGfAfUfacaugagcauL96 | 709 | asUfsgcdTc(Agn)uguaucCfaCfcuuugsusc | 997 | GACAAAGGUGGAUACAUGAGCAA | 1299 |
| AD-1526888 | asasggugGfaUfAfCfaugagcaaguL96 | 710 | asCfsuudGc(Tgn)cauguaUfcCfaccuususg | 998 | CAAAGGUGGAUACAUGAGCAAGA | 1300 |
| AD-1526889 | gsgsauacAfuGfAfGfcaagauuuguL96 | 711 | asCfsaaaUfcuugcucAfuGfuauccsasc | 999 | GUGGAUACAUGAGCAAGAUUUGC | 1301 |
| AD-1526890 | gsasuacaUfgAfGfCfaagauuugcuL96 | 712 | asGfscaaAfucuugcuCfaUfguaucscsa | 1000 | UGGAUACAUGAGCAAGAUUUGCA | 1302 |
| AD-1526891 | asusacauGfaGfCfAfagauuugcauL96 | 713 | asUfsgcaAfaucuugcUfcAfuguauscsc | 1001 | GGAUACAUGAGCAAGAUUUGCAA | 1303 |
| AD-1526892 | usascaugAfgCfAfAfgauuugcaauL96 | 714 | asUfsugcAfaaucuugCfuCfauguasusc | 1002 | GAUACAUGAGCAAGAUUUGCAAC | 1304 |
| AD-1526893 | ascsaugaGfcAfAfGfauuugcaacuL96 | 715 | asGfsuudGc(Agn)aaucuuGfcUfcaugusasu | 1003 | AUACAUGAGCAAGAUUUGCAACU | 1305 |
| AD-1526894 | usgsagcaAfgAfUfUfugcaacuuguL96 | 716 | asCfsaagUfugcaaauCfuUfgcucasusg | 1004 | CAUGAGCAAGAUUUGCAACUUGC | 1306 |
| AD-1526895 | gsasgcaaGfaUfUfUfgcaacuugcuL96 | 717 | asGfscadAg(Tgn)ugcaaaUfcUfugcucsasu | 1005 | AUGAGCAAGAUUUGCAACUUGCU | 1307 |
| AD-1526896 | asgscaagAfuUfUfGfcaacuugcuuL96 | 718 | asAfsgcaAfguugcaaAfuCfuugcuscsa | 1006 | UGAGCAAGAUUUGCAACUUGCUA | 1308 |
| AD-1526897 | gscsaagaUfuUfGfCfaacuugcuauL96 | 719 | asUfsagcAfaguugcaAfaUfcuugcsusc | 1007 | GAGCAAGAUUUGCAACUUGCUAC | 1309 |
| AD-1526898 | gscsaagaUfuUfGfCfaacuugcuauL96 | 719 | asUfsagdCa(Agn)guugcaAfaUfcuugesusc | 1008 | GAGCAAGAUUUGCAACUUGCUAC | 1309 |
| AD-1526899 | usgscaacUfuGfCfUfacccauuaguL96 | 720 | asCfsuaaUfggguagcAfaGfuugcasasa | 1009 | UUUGCAACUUGCUACCCAUUAGG | 1310 |
| AD-1526900 | gscsaacuUfgCfUfAfcccauuagguL96 | 721 | asCfscuaAfuggguagCfaAfguugcsasa | 1010 | UUGCAACUUGCUACCCAUUAGGA | 1311 |
| AD-1526901 | csasacuuGfcUfAfCfccauuaggauL96 | 722 | asUfsccuAfauggguaGfcAfaguugscsa | 1011 | UGCAACUUGCUACCCAUUAGGAU | 1312 |
| AD-1526902 | asascuugCfuAfCfCfcauuaggauuL96 | 723 | asAfsuccUfaauggguAfgCfaaguusgsc | 1012 | GCAACUUGCUACCCAUUAGGAUA | 1313 |
| AD-1526903 | ascsuugcUfaCfCfCfauuaggauauL96 | 724 | asUfsaudCc(Tgn)aaugggUfaGfcaagususg | 1013 | CAACUUGCUACCCAUUAGGAUAA | 1314 |
| AD-1526904 | gscsugccCfuGfUfAfcccugccuguL96 | 725 | asCfsaggCfaggguacAfgGfgcagcsasu | 1014 | AUGCUGCCCUGUACCCUGCCUGU | 1315 |
| AD-1526905 | cscscuguAfcCfCfUfgccuguggauL96 | 726 | asUfsccdAc(Agn)ggcaggGfuAfcagggscsa | 1015 | UGCCCUGUACCCUGCCUGUGGAA | 1316 |
| AD-1526906 | asasucugCfcAfUfUfgcgauugucuL96 | 727 | asGfsacaAfucgcaauGfgCfagauuscsc | 1016 | GGAAUCUGCCAUUGCGAUUGUCC | 1317 |
| AD-1526907 | csusgccaUfuGfCfGfauuguccaguL96 | 728 | asCfsuggAfcaaucgcAfaUfggcagsasu | 1017 | AUCUGCCAUUGCGAUUGUCCAGA | 1318 |
| AD-1526908 | usgsccauUfgCfGfAfuuguccagauL96 | 729 | asUfscudGg(Agn)caaucgCfaAfuggcasgsa | 1018 | UCUGCCAUUGCGAUUGUCCAGAG | 1319 |
| AD-1527083 | csasuugcGfaUfUfGfuccagagacuL96 | 730 | asGfsucdTc(Tgn)ggacaaUfcGfcaaugsgsc | 1019 | GCCAUUGCGAUUGUCCAGAGACU | 1320 |
| AD-1526910 | ususgcgaUfuGfUfCfcagagacuguL96 | 731 | asCfsaguCfucuggacAfaUfcgcaasusg | 1020 | CAUUGCGAUUGUCCAGAGACUGG | 1321 |
| AD-1527084 | ususgcgaUfuGfUfCfcagagacuguL96 | 731 | asCfsagdTc(Tgn)cuggacAfaUfcgcaasusg | 1021 | CAUUGCGAUUGUCCAGAGACUGG | 1321 |
| AD-1526912 | usgscgauUfgUfCfCfagagacugguL96 | 732 | asCfscagUfcucuggaCfaAfucgcasasu | 1022 | AUUGCGAUUGUCCAGAGACUGGU | 1322 |
| AD-1526913 | gscsgauuGfuCfCfAfgagacugguuL96 | 733 | asAfsccdAg(Tgn)cucuggAfcAfaucgcsasa | 1023 | UUGCGAUUGUCCAGAGACUGGUG | 1323 |
| AD-1526914 | csgsauugUfcCfAfGfagacugguguL96 | 734 | asCfsaccAfgucucugGfaCfaaucgscsa | 1024 | UGCGAUUGUCCAGAGACUGGUGA | 1324 |
| AD-1526915 | gsasuuguCfcAfGfAfgacuggugauL96 | 735 | asUfscadCc(Agn)gucucuGfgAfcaaucsgsc | 1025 | GCGAUUGUCCAGAGACUGGUGAC | 1325 |
| AD-1527085 | usgsuccaGfaGfAfCfuggugacauuL96 | 736 | asAfsugdTc(Agn)ccagucUfcUfggacasasu | 1026 | AUUGUCCAGAGACUGGUGACAUG | 1326 |
| AD-1526917 | csasgagaCfuGfGfUfgacauggcuuL96 | 737 | asAfsgccAfugucaccAfgUfcucugsgsa | 1027 | UCCAGAGACUGGUGACAUGGCUU | 1327 |
| AD-1526918 | asgsagacUfgGfUfGfacauggcuuuL96 | 738 | asAfsagcCfaugucacCfaGfucucusgsg | 1028 | CCAGAGACUGGUGACAUGGCUUC | 1328 |
| AD-1526919 | asgsagacUfgGfUfGfacauggcuuuL96 | 738 | asAfsagdCc(Agn)ugucacCfaGfucucusgsg | 1029 | CCAGAGACUGGUGACAUGGCUUC | 1328 |
| AD-1526920 | ascsugguGfaCfAfUfggcuuccaguL96 | 739 | asCfsuggAfagccaugUfcAfccaguscsu | 1030 | AGACUGGUGACAUGGCUUCCAGA | 1329 |
| AD-1526921 | csusggugAfcAfUfGfgcuuccagauL96 | 740 | asUfscudGg(Agn)agccauGfuCfaccagsusc | 1031 | GACUGGUGACAUGGCUUCCAGAU | 1330 |
| AD-1527086 | gsusgacaUfgGfCfUfuccagauauuL96 | 741 | asAfsuadTc(Tgn)ggaagcCfaUfgucacscsa | 1032 | UGGUGACAUGGCUUCCAGAUAUG | 1331 |
| AD-1526923 | usgsacauGfgCfUfUfccagauauguL96 | 742 | asCfsauaUfcuggaagCfcAfugucascsc | 1033 | GGUGACAUGGCUUCCAGAUAUGC | 1332 |
| AD-1526924 | gsascaugGfcUfUfCfcagauaugcuL96 | 743 | asGfscauAfucuggaaGfcCfaugucsasc | 1034 | GUGACAUGGCUUCCAGAUAUGCC | 1333 |
| AD-1526925 | ascsauggCfuUfCfCfagauaugccuL96 | 744 | asGfsgcaUfaucuggaAfgCfcauguscsa | 1035 | UGACAUGGCUUCCAGAUAUGCCC | 1334 |
| AD-1526926 | csasuggcUfuCfCfAfgauaugcccuL96 | 745 | asGfsggdCa(Tgn)aucuggAfaGfccaugsusc | 1036 | GACAUGGCUUCCAGAUAUGCCCG | 1335 |
| AD-1526927 | asusggcuUfcCfAfGfauaugcccguL96 | 746 | asCfsgggCfauaucugGfaAfgccausgsu | 1037 | ACAUGGCUUCCAGAUAUGCCCGA | 1336 |
| AD-1526928 | asusggcuUfcCfAfGfauaugcccguL96 | 746 | asCfsggdGc(Agn)uaucugGfaAfgccausgsu | 1038 | ACAUGGCUUCCAGAUAUGCCCGA | 1336 |
| AD-1526929 | gscsuuccAfgAfUfAfugcccgacguL96 | 747 | asCfsgucGfggcauauCfuGfgaagcscsa | 1039 | UGGCUUCCAGAUAUGCCCGACGA | 1337 |
| AD-1526930 | gscsagugGfgUfGfAfccucacagguL96 | 748 | asCfscugUfgaggucaCfcCfacugcsasa | 1040 | UUGCAGUGGGUGACCUCACAGGU | 1338 |
| AD-1526931 | cscsuccaGfgUfCfCfcaaaugccauL96 | 749 | asUfsggdCa(Tgn)uugggaCfcUfggaggscsg | 1041 | CGCCUCCAGGUCCCAAAUGCCAG | 1339 |
| AD-1526932 | csusccagGfuCfCfCfaaaugccaguL96 | 750 | asCfsuggCfauuugggAfcCfuggagsgsc | 1042 | GCCUCCAGGUCCCAAAUGCCAGU | 1340 |
| AD-1526933 | csusccagGfuCfCfCfaaaugccaguL96 | 750 | asCfsugdGc(Agn)uuugggAfcCfuggagsgsc | 1043 | GCCUCCAGGUCCCAAAUGCCAGU | 1340 |
| AD-1526934 | asgsguccCfaAfAfUfgccagugaguL96 | 751 | asCfsucaCfuggcauuUfgGfgaccusgsg | 1044 | CCAGGUCCCAAAUGCCAGUGAGC | 1341 |
| AD-1527087 | gsuscccaAfaUfGfCfcagugagcauL96 | 752 | asUfsgcdTc(Agn)cuggcaUfuUfgggacscsu | 1045 | AGGUCCCAAAUGCCAGUGAGCAG | 1342 |
| AD-1527088 | cscsucagGfuCfCfAfgccugaacuuL96 | 753 | asAfsgudTc(Agn)ggcuggAfcCfugaggsasu | 1046 | AUCCUCAGGUCCAGCCUGAACUU | 1343 |
| AD-1526937 | uscsagguCfcAfGfCfcugaacuucuL96 | 754 | asGfsaagUfucaggcuGfgAfccugasgsg | 1047 | CCUCAGGUCCAGCCUGAACUUCU | 1344 |
| AD-1526938 | uscsagguCfcAfGfCfcugaacuucuL96 | 754 | asGfsaadGu(Tgn)caggcuGfgAfccugasgsg | 1048 | CCUCAGGUCCAGCCUGAACUUCU | 1344 |
| AD-1526939 | csasggucCfaGfCfCfugaacuucuuL96 | 755 | asAfsgadAg(Tgn)ucaggcUfgGfaccugsasg | 1049 | CUCAGGUCCAGCCUGAACUUCUU | 1345 |
| AD-1526940 | asgsguccAfgCfCfUfgaacuucuuuL96 | 756 | asAfsagaAfguucaggCfuGfgaccusgsa | 1050 | UCAGGUCCAGCCUGAACUUCUUC | 1346 |
| AD-1526941 | gsgsuccaGfcCfUfGfaacuucuucuL96 | 757 | asGfsaagAfaguucagGfcUfggaccsusg | 1051 | CAGGUCCAGCCUGAACUUCUUCU | 1347 |
| AD-1526942 | ususgggcAfaUfAfAfaguaccugcuL96 | 758 | asGfscadGg(Tgn)acuuuaUfuGfcccaasgsa | 1052 | UCUUGGGCAAUAAAGUACCUGCU | 1348 |
| AD-1526943 | gsgscaauAfaAfGfUfaccugcugguL96 | 759 | asCfscagCfagguacuUfuAfuugccscsa | 1053 | UGGGCAAUAAAGUACCUGCUGGU | 1349 |
| AD-1526944 | asasuaaaGfuAfCfCfugcuggugcuL96 | 760 | asGfscacCfagcagguAfcUfuuauusgsc | 1054 | GCAAUAAAGUACCUGCUGGUGCU | 1350 |
| AD-1526945 | asasuaaaGfuAfCfCfugcuggugcuL96 | 760 | asGfscadCc(Agn)gcagguAfcUfuuauusgsc | 1055 | GCAAUAAAGUACCUGCUGGUGCU | 1350 |
| AD-1526946 | asasaguaCfcUfGfCfuggugcugauL96 | 761 | asUfscadGc(Agn)ccagcaGfgUfacuuusasu | 1056 | AUAAAGUACCUGCUGGUGCUGAG | 1351 |
| AD-1526947 | ascsuugaGfgAfGfGfcgagucuaguL96 | 762 | asCfsuagAfcucgccuCfcUfcaagusgsa | 1057 | UCACUUGAGGAGGCGAGUCUAGC | 1352 |
| AD-1526948 | gsusuuccCfaUfCfUfuugugcagcuL96 | 763 | asGfscudGc(Agn)caaagaUfgGfgaaacsusu | 1058 | AAGUUUCCCAUCUUUGUGCAGCU | 1353 |
| AD-1526949 | uscsccauCfuUfUfGfugcagcuacuL96 | 764 | asGfsuadGc(Tgn)gcacaaAfgAfugggasasa | 1059 | UUUCCCAUCUUUGUGCAGCUACC | 1354 |
| AD-1526950 | csasucuuUfgUfGfCfagcuaccucuL96 | 765 | asGfsaggUfagcugcaCfaAfagaugsgsg | 1060 | CCCAUCUUUGUGCAGCUACCUCC | 1355 |
| AD-1526951 | csasucuuUfgUfGfCfagcuaccucuL96 | 765 | asGfsagdGu(Agn)gcugcaCfaAfagaugsgsg | 1061 | CCCAUCUUUGUGCAGCUACCUCC | 1355 |
| AD-1526952 | usgsugcaGfcUfAfCfcuccgcauuuL96 | 766 | asAfsaugCfggagguaGfcUfgcacasasa | 1062 | UUUGUGCAGCUACCUCCGCAUUG | 1356 |
| AD-1526953 | usgscagcUfaCfCfUfccgcauugcuL96 | 767 | asGfscaaUfgcggaggUfaGfcugcascsa | 1063 | UGUGCAGCUACCUCCGCAUUGCU | 1357 |
| AD-1526954 | usgsccugUfgAfCfGfuggaggaucuL96 | 768 | asGfsaudCc(Tgn)ccacguCfaCfaggcasgsg | 1064 | CCUGCCUGUGACGUGGAGGAUCC | 1358 |
| AD-1526955 | csasgccuCfuGfAfGfcugaguugguL96 | 769 | asCfscaaCfucagcucAfgAfggcugsgsg | 1065 | CCCAGCCUCUGAGCUGAGUUGGU | 1359 |
| AD-1526956 | asgsccucUfgAfGfCfugaguugguuL96 | 770 | asAfsccaAfcucagcuCfaGfaggcusgsg | 1066 | CCAGCCUCUGAGCUGAGUUGGUU | 1360 |
| AD-1526957 | gscscucuGfaGfCfUfgaguugguuuL96 | 771 | asAfsaccAfacucagcUfcAfgaggcsusg | 1067 | CAGCCUCUGAGCUGAGUUGGUUU | 1361 |
| AD-1526958 | cscsucugAfgCfUfGfaguugguuuuL96 | 772 | asAfsaacCfaacucagCfuCfagaggscsu | 1068 | AGCCUCUGAGCUGAGUUGGUUUU | 1362 |
| AD-1526959 | csuscugaGfcUfGfAfguugguuuuuL96 | 773 | asAfsaaaCfcaacucaGfcUfcagagsgsc | 1069 | GCCUCUGAGCUGAGUUGGUUUUA | 1363 |
| AD-1526960 | uscsugagCfuGfAfGfuugguuuuauL96 | 774 | asUfsaaaAfccaacucAfgCfucagasgsg | 1070 | CCUCUGAGCUGAGUUGGUUUUAU | 1364 |
| AD-1526961 | csusgagcUfgAfGfUfugguuuuauuL96 | 775 | asAfsuaaAfaccaacuCfaGfcucagsasg | 1071 | CUCUGAGCUGAGUUGGUUUUAUG | 1365 |
| AD-1526962 | usgsagcuGfaGfUfUfgguuuuauguL96 | 776 | asCfsauaAfaaccaacUfcAfgcucasgsa | 1072 | UCUGAGCUGAGUUGGUUUUAUGA | 1366 |
| AD-1526963 | gsasgcugAfgUfUfGfguuuuaugauL96 | 777 | asUfscauAfaaaccaaCfuCfagcucsasg | 1073 | CUGAGCUGAGUUGGUUUUAUGAA | 1367 |
| AD-1526964 | asgscugaGfuUfGfGfuuuuaugaauL96 | 778 | asUfsucaUfaaaaccaAfcUfcagcuscsa | 1074 | UGAGCUGAGUUGGUUUUAUGAAA | 1368 |
| AD-1526965 | gscsugagUfuGfGfUfuuuaugaaauL96 | 779 | asUfsuudCa(Tgn)aaaaccAfaCfucagesusc | 1075 | GAGCUGAGUUGGUUUUAUGAAAA | 1369 |
| AD-1193373 | csusgaguUfgGfUfUfuuaugaaaauL96 | 780 | asUfsuudTc(Agn)uaaaacCfaAfcucagscsu | 1076 | AGCUGAGUUGGUUUUAUGAAAAG | 1370 |
| AD-1526967 | gsasguugGfuUfUfUfaugaaaagcuL96 | 781 | asGfscuuUfucauaaaAfcCfaacucsasg | 1077 | CUGAGUUGGUUUUAUGAAAAGCU | 1371 |
| AD-1526968 | asgsuuggUfuUfUfAfugaaaagcuuL96 | 782 | asAfsgcuUfuucauaaAfaCfcaacuscsa | 1078 | UGAGUUGGUUUUAUGAAAAGCUA | 1372 |
| AD-1526969 | gsusugguUfuUfAfUfgaaaagcuauL96 | 783 | asUfsagdCu(Tgn)uucauaAfaAfccaacsusc | 1079 | GAGUUGGUUUUAUGAAAAGCUAG | 1373 |
| AD-1526970 | ususgguuUfuAfUfGfaaaagcuaguL96 | 784 | asCfsuagCfuuuucauAfaAfaccaascsu | 1080 | AGUUGGUUUUAUGAAAAGCUAGG | 1374 |
| AD-1526971 | ususgguuUfuAfUfGfaaaagcuaguL96 | 784 | asCfsuadGc(Tgn)uuucauAfaAfaccaascsu | 1081 | AGUUGGUUUUAUGAAAAGCUAGG | 1374 |
| AD-1526972 | usgsguuuUfaUfGfAfaaagcuagguL96 | 785 | asCfscuaGfcuuuucaUfaAfaaccasasc | 1082 | GUUGGUUUUAUGAAAAGCUAGGA | 1375 |
| AD-1526973 | gsusuuuaUfgAfAfAfagcuaggaauL96 | 786 | asUfsuccUfagcuuuuCfaUfaaaacscsa | 1083 | UGGUUUUAUGAAAAGCUAGGAAG | 1376 |
| AD-1526974 | gsusuuuaUfgAfAfAfagcuaggaauL96 | 786 | asUfsucdCu(Agn)gcuuuuCfaUfaaaacscsa | 1084 | UGGUUUUAUGAAAAGCUAGGAAG | 1376 |
| AD-1526975 | ususuuauGfaAfAfAfgcuaggaaguL96 | 787 | asCfsuucCfuagcuuuUfcAfuaaaascsc | 1085 | GGUUUUAUGAAAAGCUAGGAAGC | 1377 |
| AD-1526976 | ususuuauGfaAfAfAfgcuaggaaguL96 | 787 | asCfsuudCc(Tgn)agcuuuUfcAfuaaaascsc | 1086 | GGUUUUAUGAAAAGCUAGGAAGC | 1377 |
| AD-1526977 | usasugaaAfaGfCfUfaggaagcaauL96 | 788 | asUfsugdCu(Tgn)ccuagcUfuUfucauasasa | 1087 | UUUAUGAAAAGCUAGGAAGCAAC | 1378 |
| AD-1526978 | asusucagCfuGfGfUfugggaaauguL96 | 789 | asCfsauuUfcccaaccAfgCfugaaususa | 1088 | UAAUUCAGCUGGUUGGGAAAUGA | 1379 |
| AD-1526979 | csasgcugGfuUfGfGfgaaaugacauL96 | 790 | asUfsgudCa(Tgn)uucccaAfcCfagcugsasa | 1089 | UUCAGCUGGUUGGGAAAUGACAC | 1380 |
| AD-1527089 | asgscuggUfuGfGfGfaaaugacacuL96 | 791 | asGfsugdTc(Agn)uuucccAfaCfcagcusgsa | 1090 | UCAGCUGGUUGGGAAAUGACACC | 1381 |
| AD-1526981 | gsusgcagAfgGfGfUfcccuuacuguL96 | 792 | asCfsaguAfagggaccCfuCfugcacsusg | 1091 | CAGUGCAGAGGGUCCCUUACUGA | 1382 |
| AD-1526982 | usgscagaGfgGfUfCfccuuacugauL96 | 793 | asUfscagUfaagggacCfcUfcugcascsu | 1092 | AGUGCAGAGGGUCCCUUACUGAC | 1383 |
| AD-1526983 | gscsagagGfgUfCfCfcuuacugacuL96 | 794 | asGfsucdAg(Tgn)aagggaCfcCfucugesasc | 1093 | GUGCAGAGGGUCCCUUACUGACU | 1384 |
| AD-1526984 | ususaaugGfuCfAfGfacuguuccauL96 | 795 | asUfsggaAfcagucugAfcCfauuaasusa | 1094 | UAUUAAUGGUCAGACUGUUCCAG | 1385 |
| AD-1526985 | usasauggUfcAfGfAfcuguuccaguL96 | 796 | asCfsuggAfacagucuGfaCfcauuasasu | 1095 | AUUAAUGGUCAGACUGUUCCAGC | 1386 |
| AD-1526986 | ascsgacaCfuGfCfCfugucagguguL96 | 797 | asCfsaccUfgacaggcAfgUfgucgususc | 1096 | GAACGACACUGCCUGUCAGGUGG | 1387 |
| AD-1526987 | ascsaccuUfuUfUfCfaccuaacuauL96 | 798 | asUfsaguUfaggugaaAfaAfggugususc | 1097 | GAACACCUUUUUCACCUAACUAA | 1388 |
| AD-1526988 | csasccuuUfuUfCfAfccuaacuaauL96 | 799 | asUfsuadGu(Tgn)aggugaAfaAfaggugsusu | 1098 | AACACCUUUUUCACCUAACUAAA | 1389 |
| AD-1526989 | ascscuuuUfuCfAfCfcuaacuaaauL96 | 800 | asUfsuudAg(Tgn)uaggugAfaAfaaggusgsu | 1099 | ACACCUUUUUCACCUAACUAAAA | 1390 |
| AD-1526990 | csusuuuuCfaCfCfUfaacuaaaauuL96 | 801 | asAfsuuuUfaguuaggUfgAfaaaagsgsu | 1100 | ACCUUUUUCACCUAACUAAAAUA | 1391 |
| AD-1526991 | ususuuucAfcCfUfAfacuaaaauauL96 | 802 | asUfsauuUfuaguuagGfuGfaaaaasgsg | 1101 | CCUUUUUCACCUAACUAAAAUAA | 1392 |
| AD-1526992 | ususuucaCfcUfAfAfcuaaaauaauL96 | 803 | asUfsuauUfuuaguuaGfgUfgaaaasasg | 1102 | CUUUUUCACCUAACUAAAAUAAU | 1393 |
| AD-1526993 | ususucacCfuAfAfCfuaaaauaauuL96 | 804 | asAfsuuaUfuuuaguuAfgGfugaaasasa | 1103 | UUUUUCACCUAACUAAAAUAAUG | 1394 |
| AD-1526994 | ususcaccUfaAfCfUfaaaauaauguL96 | 805 | asCfsauuAfuuuuaguUfaGfgugaasasa | 1104 | UUUUCACCUAACUAAAAUAAUGU | 1395 |
| AD-1526995 | uscsaccuAfaCfUfAfaaauaauguuL96 | 806 | asAfscauUfauuuuagUfuAfggugasasa | 1105 | UUUCACCUAACUAAAAUAAUGUU | 1396 |
| AD-1526996 | csasccuaAfcUfAfAfaauaauguuuL96 | 807 | asAfsacaUfuauuuuaGfuUfaggugsasa | 1106 | UUCACCUAACUAAAAUAAUGUUU | 1397 |
| AD-1526997 | ascscuaaCfuAfAfAfauaauguuuuL96 | 808 | asAfsaacAfuuauuuuAfgUfuaggusgsa | 1107 | UCACCUAACUAAAAUAAUGUUUA | 1398 |
| AD-1526998 | cscsuaacUfaAfAfAfuaauguuuauL96 | 809 | asUfsaaaCfauuauuuUfaGfuuaggsusg | 1108 | CACCUAACUAAAAUAAUGUUUAA | 1399 |
| AD-1526999 | cscsuaacUfaAfAfAfuaauguuuauL96 | 809 | asUfsaadAc(Agn)uuauuuUfaGfuuaggsusg | 1109 | CACCUAACUAAAAUAAUGUUUAA | 1399 |
| AD-1527000 | csusaacuAfaAfAfUfaauguuuaauL96 | 810 | asUfsuaaAfcauuauuUfuAfguuagsgsu | 1110 | ACCUAACUAAAAUAAUGUUUAAA | 1400 |
| AD-1527001 | usasacuaAfaAfUfAfauguuuaaauL96 | 811 | asUfsuuaAfacauuauUfuUfaguuasgsg | 1111 | CCUAACUAAAAUAAUGUUUAAAG | 1401 |
| AD-1527002 | asascuaaAfaUfAfAfuguuuaaaguL96 | 812 | asCfsuuuAfaacauuaUfuUfuaguusasg | 1112 | CUAACUAAAAUAAUGUUUAAAGA | 1402 |
| AD-1527003 | ascsuaaaAfuAfAfUfguuuaaagauL96 | 813 | asUfscuuUfaaacauuAfuUfuuagususa | 1113 | UAACUAAAAUAAUGUUUAAAGAG | 1403 |
| AD-1527004 | ascscuguUfgAfAfUfuuuguauuauL96 | 814 | asUfsaauAfcaaaauuCfaAfcaggusasa | 1114 | UUACCUGUUGAAUUUUGUAUUAU | 1404 |
| AD-1527005 | cscsuguuGfaAfUfUfuuguauuauuL96 | 815 | asAfsuaaUfacaaaauUfcAfacaggsusa | 1115 | UACCUGUUGAAUUUUGUAUUAUG | 1405 |
| AD-1527006 | usgscggcUfuCfCfUfgggcuucuauL96 | 816 | asUfsagdAa(G2p)cccaggAfaGfccgcasgsc | 1116 | GCUGCGGCUUCCUGGGCUUCUAC | 1406 |
| AD-1527090 | ususccugGfgCfUfUfcuaccacguuL96 | 817 | asAfscgdTg(G2p)uagaagCfcCfaggaasgsc | 1117 | GCUUCCUGGGCUUCUACCACGUC | 1407 |
| AD-1527008 | cscscgcuGfgAfGfCfagacucugcuL96 | 818 | asGfscadGa(G2p)ucugcuCfcAfgcgggsasu | 1118 | AUCCCGCUGGAGCAGACUCUGCA | 1408 |
| AD-1527009 | csasgacuCfuGfCfAfgguccucucuL96 | 819 | asGfsagdAg(G2p)accugcAfgAfgucugscsu | 1119 | AGCAGACUCUGCAGGUCCUCUCA | 1409 |
| AD-1527010 | ascsucugCfaGfGfUfccucucagauL96 | 820 | asUfscudGa(G2p)aggaccUfgCfagaguscsu | 1120 | AGACUCUGCAGGUCCUCUCAGAU | 1410 |
| AD-1527011 | uscsugcaGfgUfCfCfucucagaucuL96 | 821 | asGfsaudCu(G2p)agaggaCfcUfgcagasgsu | 1121 | ACUCUGCAGGUCCUCUCAGAUCU | 1411 |
| AD-1527012 | usgscaggUfcCfUfCfucagaucuuuL96 | 604 | asAfsagdAu(C2p)ugagagGfaCfcugcasgsa | 1122 | UCUGCAGGUCCUCUCAGAUCUUG | 1194 |
| AD-1527013 | csasucuuCfcAfUfCfcauccuucauL96 | 822 | asUfsgadAg(G2p)auggauGfgAfagaugscsc | 1123 | GGCAUCUUCCAUCCAUCCUUCAA | 1412 |
| AD-1527014 | asasugucCfaCfCfAfgcucaucucuL96 | 612 | asGfsagdAu(G2p)agcuggUfgGfacauusgsg | 1124 | CCAAUGUCCACCAGCUCAUCUCC | 1202 |
| AD-1527015 | usascaguGfgCfCfUfuaucccuccuL96 | 823 | asGfsgadGg(G2p)auaaggCfcAfcuguasgsa | 1125 | UCUACAGUGGCCUUAUCCCUCCU | 1413 |
| AD-1527016 | csasguggCfcUfUfAfucccuccuuuL96 | 824 | asAfsagdGa(G2p)ggauaaGfgCfcacugsusa | 1126 | UACAGUGGCCUUAUCCCUCCUUC | 1414 |
| AD-1527017 | gsusggccUfuAfUfCfccuccuuccuL96 | 825 | asGfsgadAg(G2p)agggauAfaGfgccacsusg | 1127 | CAGUGGCCUUAUCCCUCCUUCCU | 1415 |
| AD-1527018 | cscscuccUfuCfCfUfucagaggcguL96 | 626 | asCfsgcdCu(C2p)ugaaggAfaGfgagggsasu | 1128 | AUCCCUCCUUCCUUCAGAGGCGU | 1216 |
| AD-1527019 | usgsagugAfcAfAfCfguacccuucuL96 | 826 | asGfsaadGg(G2p)uacguuGfuCfacucascsu | 1129 | AGUGAGUGACAACGUACCCUUCA | 1416 |
| AD-1527020 | gsasgugaCfaAfCfGfuacccuucauL96 | 827 | asUfsgadAg(G2p)guacguUfgUfcacucsasc | 1130 | GUGAGUGACAACGUACCCUUCAU | 1417 |
| AD-1527021 | ascsguacCfcUfUfCfauugaugccuL96 | 828 | asGfsgcdAu(C2p)aaugaaGfgGfuacgususg | 1131 | CAACGUACCCUUCAUUGAUGCCA | 1418 |
| AD-1527022 | asgsuacgAfcAfUfCfugcccuaaauL96 | 829 | asUfsuudAg(G2p)gcagauGfuCfguacuscsc | 1132 | GGAGUACGACAUCUGCCCUAAAG | 1419 |
| AD-1527091 | asuscugcCfcUfAfAfagucaagucuL96 | 830 | asGfsacdTu(G2p)acuuuaGfgGfcagausgsu | 1133 | ACAUCUGCCCUAAAGUCAAGUCC | 1420 |
| AD-1527024 | csuscugcAfcAfGfGfgaaccucuauL96 | 831 | asUfsagdAg(G2p)uucccuGfuGfcagagsgsc | 1134 | GCCUCUGCACAGGGAACCUCUAC | 1421 |
| AD-1527025 | uscsugcaCfaGfGfGfaaccucuacuL96 | 832 | asGfsuadGa(G2p)guucccUfgUfgcagasgsg | 1135 | CCUCUGCACAGGGAACCUCUACC | 1422 |
| AD-1527026 | ascsagggAfaCfCfUfcuaccuucuuL96 | 833 | asAfsgadAg(G2p)uagaggUfuCfccugusgsc | 1136 | GCACAGGGAACCUCUACCUUCUC | 1423 |
| AD-1527027 | csusgggaGfaGfAfUfaugccuucguL96 | 834 | asCfsgadAg(G2p)cauaucUfcUfcccagscsa | 1137 | UGCUGGGAGAGAUAUGCCUUCGA | 1424 |
| AD-1527028 | usgsggagAfgAfUfAfugccuucgauL96 | 671 | asUfscgdAa(G2p)gcauauCfuCfucccasgsc | 1138 | GCUGGGAGAGAUAUGCCUUCGAG | 1261 |
| AD-1527029 | asgsagauAfuGfCfCfuucgaggauuL96 | 835 | asAfsucdCu(C2p)gaaggcAfuAfucucuscsc | 1139 | GGAGAGAUAUGCCUUCGAGGAUA | 1425 |
| AD-1527092 | asgsauauGfcCfUfUfcgaggauauuL96 | 836 | asAfsuadTc(C2p)ucgaagGfcAfuaucuscsu | 1140 | AGAGAUAUGCCUUCGAGGAUAUU | 1426 |
| AD-1527031 | gsasuaugCfcUfUfCfgaggauauuuL96 | 676 | asAfsaudAu(C2p)cucgaaGfgCfauaucsusc | 1141 | GAGAUAUGCCUUCGAGGAUAUUU | 1266 |
| AD-1527032 | gsasagagAfaGfGfGfcaucugcaauL96 | 837 | asUfsugdCa(G2p)augcccUfuCfucuucscsa | 1142 | UGGAAGAGAAGGGCAUCUGCAAC | 1427 |
| AD-1527033 | gsasgcugCfuAfGfAfccaccugcguL96 | 838 | asCfsgcdAg(G2p)uggucuAfgCfagcucsasu | 1143 | AUGAGCUGCUAGACCACCUGCGU | 1428 |
| AD-1527034 | gsasccacCfuGfCfGfucucagcauuL96 | 839 | asAfsugdCu(G2p)agacgcAfgGfuggucsusa | 1144 | UAGACCACCUGCGUCUCAGCAUC | 1429 |
| AD-1527035 | csasccugCfgUfCfUfcagcauccuuL96 | 840 | asAfsggdAu(G2p)cugagaCfgCfaggugsgsu | 1145 | ACCACCUGCGUCUCAGCAUCCUG | 1430 |
| AD-1527036 | cscscuggGfaUfGfAfgagcauccuuL96 | 841 | asAfsggdAu(G2p)cucucaUfcCfcagggscsa | 1146 | UGCCCUGGGAUGAGAGCAUCCUG | 1431 |
| AD-1527093 | asgsguggAfuAfCfAfugagcaagauL96 | 842 | asUfscudTg(C2p)ucauguAfuCfcaccususu | 1147 | AAAGGUGGAUACAUGAGCAAGAU | 1432 |
| AD-1527094 | gsgsuggaUfaCfAfUfgagcaagauuL96 | 843 | asAfsucdTu(G2p)cucaugUfaUfccaccsusu | 1148 | AAGGUGGAUACAUGAGCAAGAUU | 1433 |
| AD-1527095 | csasugagCfaAfGfAfuuugcaacuuL96 | 844 | asAfsgudTg(C2p)aaaucuUfgCfucaugsusa | 1149 | UACAUGAGCAAGAUUUGCAACUU | 1434 |
| AD-1527096 | asusgagcAfaGfAfUfuugcaacuuuL96 | 845 | asAfsagdTu(G2p)caaaucUfuGfcucausgsu | 1150 | ACAUGAGCAAGAUUUGCAACUUG | 1435 |
| AD-1527041 | ususugcaAfcUfUfGfcuacccauuuL96 | 846 | asAfsaudGg(G2p)uagcaaGfuUfgcaaasusc | 1151 | GAUUUGCAACUUGCUACCCAUUA | 1436 |
| AD-1527042 | asusgcugCfcCfUfGfuacccugccuL96 | 847 | asGfsgcdAg(G2p)guacagGfgCfagcaususa | 1152 | UAAUGCUGCCCUGUACCCUGCCU | 1437 |
| AD-1527097 | gscscauuGfcGfAfUfuguccagaguL96 | 848 | asCfsucdTg(G2p)acaaucGfcAfauggcsasg | 1153 | CUGCCAUUGCGAUUGUCCAGAGA | 1438 |
| AD-1527044 | cscsauugCfgAfUfUfguccagagauL96 | 849 | asUfscudCu(G2p)gacaauCfgCfaauggscsa | 1154 | UGCCAUUGCGAUUGUCCAGAGAC | 1439 |
| AD-1527045 | asusugcgAfuUfGfUfccagagacuuL96 | 850 | asAfsgudCu(C2p)uggacaAfuCfgcaausgsg | 1155 | CCAUUGCGAUUGUCCAGAGACUG | 1440 |
| AD-1527046 | cscsagagAfcUfGfGfugacauggcuL96 | 851 | asGfsccdAu(G2p)ucaccaGfuCfucuggsasc | 1156 | GUCCAGAGACUGGUGACAUGGCU | 1441 |
| AD-1527047 | gsascuggUfgAfCfAfuggcuuccauL96 | 852 | asUfsggdAa(G2p)ccauguCfaCfcagucsusc | 1157 | GAGACUGGUGACAUGGCUUCCAG | 1442 |
| AD-1527098 | usgsgugaCfaUfGfGfcuuccagauuL96 | 853 | asAfsucdTg(G2p)aagccaUfgUfcaccasgsu | 1158 | ACUGGUGACAUGGCUUCCAGAUA | 1443 |
| AD-1527049 | gsgsugacAfuGfGfCfuuccagauauL96 | 854 | asUfsaudCu(G2p)gaagccAfuGfucaccsasg | 1159 | CUGGUGACAUGGCUUCCAGAUAU | 1444 |
| AD-1527050 | usgsgcuuCfcAfGfAfuaugcccgauL96 | 855 | asUfscgdGg(C2p)auaucuGfgAfagccasusg | 1160 | CAUGGCUUCCAGAUAUGCCCGAC | 1445 |
| AD-1527051 | gsgscuucCfaGfAfUfaugcccgacuL96 | 856 | asGfsucdGg(G2p)cauaucUfgGfaagccsasu | 1161 | AUGGCUUCCAGAUAUGCCCGACG | 1446 |
| AD-1527052 | gsusugcaGfuGfGfGfugaccucacuL96 | 857 | asGfsugdAg(G2p)ucacccAfcUfgcaacscsa | 1162 | UGGUUGCAGUGGGUGACCUCACA | 1447 |
| AD-1527099 | cscsagguCfcCfAfAfaugccaguguL96 | 858 | asCfsacdTg(G2p)cauuugGfgAfccuggsasg | 1163 | CUCCAGGUCCCAAAUGCCAGUGA | 1448 |
| AD-1527054 | asgsguccAfgCfCfUfgaacuucuuuL96 | 756 | asAfsagdAa(G2p)uucaggCfuGfgaccusgsa | 1164 | UCAGGUCCAGCCUGAACUUCUUC | 1346 |
| AD-1527100 | gscsucucCfaCfCfUfuucccaguuuL96 | 859 | asAfsacdTg(G2p)gaaaggUfgGfagagcscsc | 1165 | GGGCUCUCCACCUUUCCCAGUUU | 1449 |
| AD-1527056 | asusucuuUfcAfGfAfggugcuaaauL96 | 860 | asUfsuudAg(C2p)accucuGfaAfagaauscsu | 1166 | AGAUUCUUUCAGAGGUGCUAAAG | 1450 |
| AD-1527057 | ususcccaUfcUfUfUfgugcagcuauL96 | 861 | asUfsagdCu(G2p)cacaaaGfaUfgggaasasc | 1167 | GUUUCCCAUCUUUGUGCAGCUAC | 1451 |
| AD-1527058 | usgsugcaGfcUfAfCfcuccgcauuuL96 | 766 | asAfsaudGc(G2p)gagguaGfcUfgcacasasa | 1168 | UUUGUGCAGCUACCUCCGCAUUG | 1356 |
| AD-1527059 | gsascgugGfaGfGfAfucccagccuuL96 | 862 | asAfsggdCu(G2p)ggauccUfcCfacgucsasc | 1169 | GUGACGUGGAGGAUCCCAGCCUC | 1452 |
| AD-1527060 | usgsgaggAfuCfCfCfagccucugauL96 | 863 | asUfscadGa(G2p)gcugggAfuCfcuccascsg | 1170 | CGUGGAGGAUCCCAGCCUCUGAG | 1453 |
| AD-1527061 | csuscugaGfcUfGfAfguugguuuuuL96 | 773 | asAfsaadAc(C2p)aacucaGfcUfcagagsgsc | 1171 | GCCUCUGAGCUGAGUUGGUUUUA | 1363 |
| AD-1527101 | usgsaguuGfgUfUfUfuaugaaaaguL96 | 864 | asCfsuudTu(C2p)auaaaaCfcAfacucasgsc | 1172 | GCUGAGUUGGUUUUAUGAAAAGC | 1454 |
| AD-1527102 | gsgsuuuuAfuGfAfAfaagcuaggauL96 | 865 | asUfsccdTa(G2p)cuuuucAfuAfaaaccsasa | 1173 | UUGGUUUUAUGAAAAGCUAGGAA | 1455 |
| AD-1527103 | ususuaugAfaAfAfGfcuaggaagcuL96 | 866 | asGfscudTc(C2p)uagcuuUfuCfauaaasasc | 1174 | GUUUUAUGAAAAGCUAGGAAGCA | 1456 |
| AD-1527104 | ususaugaAfaAfGfCfuaggaagcauL96 | 867 | asUfsgcdTu(C2p)cuagcuUfuUfcauaasasa | 1175 | UUUUAUGAAAAGCUAGGAAGCAA | 1457 |
| AD-1527105 | asasuucaGfcUfGfGfuugggaaauuL96 | 868 | asAfsuudTc(C2p)caaccaGfcUfgaauusasa | 1176 | UUAAUUCAGCUGGUUGGGAAAUG | 1458 |
| AD-1527067 | csasgaggGfuCfCfCfuuacugacuuL96 | 869 | asAfsgudCa(G2p)uaagggAfcCfcucugscsa | 1177 | UGCAGAGGGUCCCUUACUGACUG | 1459 |
| AD-1527068 | usasuuaaUfgGfUfCfagacuguucuL96 | 870 | asGfsaadCa(G2p)ucugacCfaUfuaauasgsg | 1178 | CCUAUUAAUGGUCAGACUGUUCC | 1460 |
| AD-1527106 | asascaccUfuUfUfUfcaccuaacuuL96 | 871 | asAfsgudTa(G2p)gugaaaAfaGfguguuscsu | 1179 | AGAACACCUUUUUCACCUAACUA | 1461 |
| AD-1527107 | cscsuuuuUfcAfCfCfuaacuaaaauL96 | 872 | asUfsuudTa(G2p)uuagguGfaAfaaaggsusg | 1180 | CACCUUUUUCACCUAACUAAAAU | 1462 |

TABLE 4
In Vitro Screen in Hep3B cells

| | Hep3B Transfection | | | | | |
|---|---|---|---|---|---|---|
| | 50 nM | | 10 nM | | 1 nM | |
| | % of | | % of | | % of | |
| | message | | message | | message | |
| | remain- | St | remain- | St | remain- | St |
| DuplexID | ing | Dev | ing | Dev | ing | Dev |
| AD-1526763.1 | 43.68 | 7.66 | 181.42 | 13.60 | 136.21 | 17.31 |
| AD-1527006.1 | 58.05 | 16.93 | 58.84 | 5.93 | 108.83 | 8.56 |
| AD-1526764.1 | 114.18 | 3.92 | 155.68 | 23.31 | 76.32 | 36.13 |
| AD-1526765.1 | 83.14 | 12.89 | 139.55 | 41.56 | 91.73 | 44.28 |
| AD-1526766.1 | 122.68 | 26.64 | 138.64 | 9.78 | 123.48 | 58.96 |
| AD-1526767.1 | 131.94 | 25.92 | 152.31 | 51.86 | 78.01 | 19.26 |
| AD-1527090.1 | 35.21 | 6.06 | 58.54 | 9.71 | 60.78 | 14.27 |
| AD-1526768.1 | 119.41 | 29.90 | 99.00 | 16.42 | 113.90 | 41.72 |
| AD-1526769.1 | 153.69 | 16.54 | 195.82 | 75.85 | 64.62 | 14.63 |
| AD-1526770.1 | 175.84 | 46.29 | 215.65 | 75.08 | 137.98 | 24.52 |
| AD-1527008.1 | 43.03 | 14.31 | 69.68 | 4.54 | 88.86 | 26.56 |
| AD-1526771.1 | 77.30 | 22.42 | 96.13 | 16.73 | 73.61 | 22.28 |
| AD-1526772.1 | 68.48 | 8.41 | 85.29 | 26.44 | 57.61 | 29.56 |
| AD-1527009.1 | 42.74 | 7.97 | 43.51 | 9.66 | 59.45 | 8.65 |
| AD-1526773.1 | 74.79 | 14.85 | 80.19 | 9.48 | 40.34 | 16.76 |
| AD-1527010.1 | 33.84 | 6.13 | 63.81 | 6.43 | 68.30 | 11.12 |
| AD-1527072.1 | 77.73 | 5.92 | 75.34 | 5.27 | 49.69 | 12.24 |
| AD-1527011.1 | 59.33 | 18.13 | 73.48 | 3.68 | 97.66 | 30.04 |
| AD-1527073.1 | 33.26 | 12.21 | 60.52 | 13.44 | 40.99 | 15.37 |
| AD-1527012.1 | 123.41 | 44.38 | 127.86 | 12.67 | 125.12 | 34.30 |
| AD-1526776.1 | 72.77 | 15.21 | 81.61 | 8.25 | 57.82 | 17.75 |
| AD-1526777.1 | 64.56 | 11.50 | 86.26 | 5.87 | 52.83 | 15.50 |
| AD-1526778.1 | 148.34 | 35.79 | 136.17 | 20.96 | 138.39 | 20.82 |
| AD-1527074.1 | 98.24 | 27.36 | 196.89 | 59.40 | 90.21 | 28.04 |
| AD-1526780.1 | 87.94 | 27.44 | 117.41 | 35.81 | 85.29 | 26.99 |
| AD-1526781.1 | 76.69 | 17.03 | 118.11 | 15.20 | 55.74 | 14.20 |
| AD-1527013.1 | 66.62 | 8.03 | 67.19 | 11.53 | 89.46 | 25.63 |
| AD-1526782.1 | 88.36 | 22.24 | 116.96 | 10.93 | 75.92 | 18.06 |
| AD-1527075.1 | 62.63 | 11.22 | 73.33 | 3.57 | 48.35 | 7.83 |
| AD-1527014.1 | 58.20 | 4.44 | 77.19 | 17.96 | 54.31 | 4.41 |
| AD-1526784.1 | 73.82 | 20.16 | 96.48 | 26.47 | 64.25 | 9.86 |
| AD-1526785.1 | 119.20 | 9.92 | 153.50 | 45.22 | 186.36 | 18.74 |
| AD-1526786.1 | 96.65 | 22.25 | 111.90 | 18.07 | 129.07 | 19.15 |
| AD-1526787.1 | 87.75 | 18.71 | 93.68 | 17.36 | 87.75 | 21.03 |
| AD-1526788.1 | 64.55 | 12.37 | 82.56 | 20.24 | 40.65 | 8.51 |
| AD-1526789.1 | 53.77 | 9.08 | 60.47 | 15.42 | 53.93 | 12.71 |
| AD-1526790.1 | 74.54 | 11.91 | 114.45 | 9.13 | 76.82 | 7.11 |
| AD-1526791.1 | 78.09 | 7.33 | 112.71 | 31.23 | 79.26 | 24.02 |
| AD-1526792.1 | 77.89 | 19.83 | 69.58 | 4.59 | 59.03 | 15.77 |
| AD-1526793.1 | 105.60 | 53.31 | 165.15 | 27.61 | 161.89 | 10.86 |
| AD-1527015.1 | 41.17 | 1.93 | 40.76 | 15.19 | 53.79 | 8.32 |
| AD-1527016.1 | 56.05 | 9.21 | 68.28 | 9.38 | 67.98 | 16.74 |
| AD-1526794.1 | 58.79 | 15.75 | 78.21 | 13.17 | 67.27 | 10.53 |
| AD-1527017.1 | 70.52 | 5.18 | 89.96 | 19.48 | 135.31 | 25.40 |
| AD-1526795.1 | 51.99 | 12.25 | 57.65 | 4.96 | 40.95 | 17.51 |
| AD-1526796.1 | 37.36 | 8.47 | 46.36 | 9.89 | 49.34 | 15.73 |
| AD-1526797.1 | 65.01 | 12.64 | 80.03 | 5.10 | 59.17 | 11.40 |
| AD-1527018.1 | 67.07 | 10.29 | 91.34 | 19.96 | 123.38 | 34.94 |
| AD-1526798.1 | 67.32 | 14.00 | 96.68 | 14.84 | 89.78 | 26.78 |
| AD-1526799.1 | 108.59 | 13.34 | 125.32 | 29.43 | 98.61 | 24.75 |
| AD-1526800.1 | 171.82 | 23.70 | 152.44 | 24.55 | 117.88 | 30.09 |
| AD-1526801.1 | 108.78 | 21.59 | 118.99 | 29.99 | 127.16 | 26.63 |
| AD-1526802.1 | 96.99 | 22.67 | 127.81 | 21.15 | 62.19 | 13.93 |
| AD-1526803.1 | 80.06 | 9.63 | 108.17 | 18.13 | 43.32 | 4.30 |
| AD-1526804.1 | 79.14 | 8.73 | 88.77 | 16.65 | 74.12 | 22.19 |
| AD-1526805.1 | 102.58 | 8.31 | 116.51 | 6.60 | 78.81 | 18.03 |
| AD-1526806.1 | 68.15 | 13.14 | 92.96 | 24.34 | 72.95 | 18.24 |
| AD-1526807.1 | 55.89 | 8.83 | 75.56 | 10.97 | 56.41 | 16.55 |
| AD-1526808.1 | 96.45 | 12.43 | 96.21 | 17.45 | 101.04 | 21.38 |
| AD-1526809.1 | 66.54 | 19.98 | 90.32 | 11.54 | 87.22 | 14.89 |
| AD-1526810.1 | 66.39 | 18.78 | 91.36 | 28.16 | 108.70 | 24.37 |
| AD-1526811.1 | 130.29 | 9.54 | 157.84 | 47.85 | 142.11 | 45.97 |
| AD-1526812.2 | 34.47 | 7.82 | 43.52 | 11.77 | 41.81 | 11.97 |
| AD-1526812.1 | 83.20 | 24.20 | 60.45 | 14.69 | 97.10 | 34.36 |
| AD-1527019.1 | 76.17 | 23.27 | 77.37 | 13.08 | 78.31 | 20.20 |
| AD-1527020.2 | 34.99 | 5.56 | 44.00 | 5.66 | 30.63 | 5.65 |
| AD-1527020.1 | 26.42 | 2.01 | 34.55 | 6.72 | 46.67 | 11.48 |
| AD-1526813.1 | 49.62 | 6.12 | 50.19 | 2.84 | 38.16 | 11.19 |
| AD-1526814.1 | 54.03 | 13.48 | 65.30 | 19.73 | 47.10 | 6.60 |
| AD-1526815.1 | 70.84 | 8.11 | 92.44 | 2.45 | 89.54 | 9.04 |
| AD-1526816.1 | 41.99 | 8.84 | 56.84 | 14.62 | 46.95 | 5.29 |
| AD-1526817.1 | 36.23 | 6.41 | 60.26 | 13.19 | 39.94 | 5.18 |
| AD-1526818.1 | 47.98 | 2.53 | 66.35 | 13.87 | 87.53 | 12.05 |
| AD-1526819.1 | 119.04 | 42.58 | 124.80 | 21.09 | 148.12 | 32.92 |
| AD-1527021.1 | 63.91 | 19.78 | 61.68 | 5.18 | 58.06 | 10.22 |
| AD-1526820.2 | 38.33 | 8.91 | 37.64 | 8.13 | 35.09 | 4.39 |
| AD-1526820.1 | 47.08 | 9.66 | 48.36 | 5.73 | 45.91 | 12.76 |
| AD-1526821.1 | 53.23 | 7.75 | 62.76 | 9.56 | 50.12 | 7.90 |
| AD-1527022.1 | 38.70 | 9.61 | 42.97 | 8.50 | 39.25 | 4.48 |
| AD-1526822.1 | 50.62 | 5.87 | 50.70 | 6.50 | 49.37 | 11.99 |
| AD-1526823.1 | 42.79 | 7.87 | 48.33 | 3.11 | 44.55 | 5.46 |
| AD-1526824.1 | 40.67 | 13.82 | 63.95 | 11.12 | 51.37 | 11.24 |
| AD-1526825.1 | 55.46 | 21.60 | 83.45 | 18.71 | 97.72 | 14.22 |
| AD-1527091.1 | 67.10 | 10.74 | 64.51 | 9.14 | 70.62 | 21.66 |
| AD-1526827.1 | 18.08 | 4.49 | 50.38 | 13.65 | 48.69 | 11.44 |
| AD-1526826.1 | 50.58 | 13.77 | 65.79 | 12.67 | 59.92 | 27.86 |
| AD-1526828.1 | 44.89 | 10.80 | 59.63 | 4.27 | 44.56 | 6.61 |
| AD-1526830.1 | 70.82 | 12.22 | 75.57 | 6.87 | 58.52 | 11.57 |
| AD-1526829.1 | 68.49 | 11.11 | 95.04 | 6.81 | 69.33 | 8.87 |
| AD-1526831.1 | 61.84 | 13.89 | 80.85 | 9.40 | 57.43 | 13.70 |
| AD-1527076.1 | 55.67 | 12.14 | 77.00 | 19.13 | 74.75 | 22.92 |
| AD-1526833.1 | 55.81 | 9.84 | 52.49 | 4.27 | 47.54 | 21.50 |
| AD-1527024.1 | 73.20 | 19.03 | 62.91 | 17.74 | 106.51 | 17.79 |
| AD-1527025.1 | 66.36 | 6.24 | 67.19 | 10.66 | 84.57 | 20.21 |
| AD-1526834.1 | 68.54 | 20.21 | 83.29 | 21.05 | 55.55 | 15.45 |
| AD-1526834.2 | 64.83 | 18.39 | 59.85 | 3.33 | 58.17 | 13.32 |
| AD-1526835.2 | 28.10 | 2.16 | 43.83 | 9.76 | 26.75 | 7.30 |
| AD-1526835.1 | 36.51 | 10.40 | 34.41 | 2.81 | 35.50 | 9.79 |
| AD-1526836.1 | 33.12 | 10.43 | 46.01 | 7.36 | 23.30 | 9.57 |
| AD-1526836.2 | 38.83 | 4.51 | 61.41 | 10.14 | 67.46 | 12.14 |
| AD-1527026.1 | 34.85 | 4.42 | 42.91 | 12.61 | 35.45 | 6.74 |
| AD-1527026.2 | 30.16 | 2.86 | 37.50 | 4.54 | 40.29 | 8.69 |
| AD-1526837.2 | 48.94 | 15.13 | 56.90 | 11.70 | 70.50 | 13.24 |
| AD-1526837.1 | 37.29 | 11.59 | 33.60 | 5.61 | 145.09 | 40.97 |
| AD-1526838.1 | 41.27 | 3.44 | 59.42 | 10.16 | 49.44 | 18.79 |
| AD-1526839.1 | 51.20 | 10.31 | 41.15 | 6.26 | 41.66 | 14.44 |
| AD-1526839.2 | 52.99 | 10.71 | 64.23 | 13.34 | 51.30 | 20.44 |
| AD-1527077.1 | 91.18 | 25.24 | 68.49 | 16.90 | 67.30 | 21.84 |
| AD-1526841.1 | 76.63 | 18.36 | 87.08 | 23.10 | 85.23 | 28.21 |
| AD-1526842.1 | 81.44 | 21.79 | 54.64 | 22.17 | 51.73 | 15.00 |
| AD-1526843.1 | 75.45 | 25.32 | 62.39 | 25.42 | 75.59 | 12.99 |
| AD-1526844.1 | 63.48 | 10.82 | 60.76 | 14.64 | 40.43 | 11.35 |
| AD-1526845.1 | 36.44 | 5.86 | 32.87 | 8.30 | 39.88 | 6.95 |
| AD-1527027.1 | 27.73 | 3.57 | 27.83 | 2.81 | 41.08 | 5.71 |
| AD-1527027.2 | 42.42 | 7.52 | 46.72 | 9.13 | 60.97 | 15.27 |
| AD-1527028.1 | 46.63 | 10.58 | 56.08 | 9.22 | 52.40 | 15.96 |
| AD-1527028.2 | 52.54 | 9.22 | 59.69 | 5.15 | 74.14 | 11.24 |
| AD-1526846.2 | 36.29 | 8.78 | 34.15 | 11.02 | 41.26 | 10.41 |
| AD-1526846.1 | 36.91 | 5.36 | 28.18 | 8.59 | 48.85 | 7.12 |
| AD-1526847.1 | 38.66 | 9.93 | 32.54 | 11.74 | 47.82 | 14.06 |
| AD-1526847.2 | | | | | | |
| AD-1526848.1 | 69.79 | 22.93 | 52.39 | 20.67 | 58.82 | 12.59 |
| AD-1526848.2 | 73.31 | 20.03 | 48.45 | 10.41 | 69.40 | 12.04 |
| AD-1526849.1 | 49.39 | 13.76 | 38.66 | 11.47 | 43.01 | 5.24 |
| AD-1526849.2 | 46.07 | 7.22 | 37.03 | 3.90 | 46.50 | 11.14 |
| AD-1527029.2 | 82.20 | 24.08 | 68.27 | 24.23 | 100.77 | 27.53 |
| AD-1527029.1 | 71.48 | 27.82 | 60.44 | 3.58 | 108.03 | 31.28 |
| AD-1526850.1 | 40.11 | 4.38 | 28.12 | 7.11 | 30.80 | 3.74 |
| AD-1526850.2 | 38.79 | 7.13 | 26.24 | 9.22 | 31.19 | 9.61 |
| AD-1527092.2 | 40.70 | 10.52 | 47.82 | 4.00 | 60.02 | 12.05 |
| AD-1527092.1 | 46.11 | 7.40 | 52.04 | 7.08 | 73.20 | 9.59 |
| AD-1527031.1 | 52.93 | 6.96 | 65.78 | 13.85 | 69.63 | 7.87 |
| AD-1527031.2 | 63.79 | 8.94 | 57.89 | 6.78 | 69.69 | 18.40 |
| AD-1526851.2 | 53.52 | 14.01 | 50.33 | 16.75 | 58.83 | 3.58 |
| AD-1526851.1 | 61.27 | 15.99 | 50.00 | 10.67 | 61.87 | 5.70 |
| AD-1526852.2 | 36.35 | 7.08 | 31.05 | 10.40 | 29.66 | 1.55 |
| AD-1526852.1 | 52.95 | 15.70 | 29.39 | 11.18 | 31.03 | 4.92 |
| AD-1526853.1 | 48.96 | 10.17 | 37.98 | 10.57 | 46.14 | 5.02 |
| AD-1526854.1 | 93.11 | 9.69 | 82.00 | 5.90 | 86.61 | 13.23 |
| AD-1526855.1 | 53.65 | 11.50 | 54.55 | 17.35 | 68.93 | 10.94 |
| AD-1526856.1 | 59.22 | 5.88 | 49.39 | 11.67 | 80.53 | 9.48 |
| AD-1526857.1 | 104.50 | 25.47 | 43.76 | 17.44 | 78.66 | 12.36 |
| AD-1526859.1 | 62.18 | 11.24 | 69.00 | 7.48 | 73.58 | 9.69 |
| AD-1526858.1 | 98.49 | 15.02 | 93.59 | 23.59 | 109.28 | 29.05 |
| AD-1526860.1 | 58.24 | 8.35 | 47.89 | 13.67 | 64.79 | 11.24 |
| AD-1527032.1 | 38.57 | 3.50 | 38.91 | 8.27 | 44.81 | 2.41 |
| AD-1526861.1 | 52.37 | 5.58 | 64.90 | 10.37 | 81.36 | 6.52 |
| AD-1527078.1 | 47.57 | 5.68 | 51.55 | 16.61 | 94.51 | 5.09 |
| AD-1526863.1 | 111.02 | 12.67 | 85.71 | 9.51 | 104.89 | 19.51 |
| AD-1526864.1 | 89.20 | 14.44 | 74.31 | 7.92 | 90.32 | 22.05 |
| AD-1526865.1 | 80.40 | 15.11 | 63.08 | 20.05 | 101.98 | 23.71 |
| AD-1526866.1 | 84.08 | 9.33 | 59.60 | 19.08 | 92.28 | 16.88 |
| AD-1526867.1 | 75.93 | 16.07 | 59.07 | 6.72 | 93.72 | 19.07 |
| AD-1526868.1 | 62.35 | 7.36 | 70.09 | 12.15 | 70.05 | 3.61 |
| AD-1526869.1 | 91.79 | 19.33 | 97.14 | 22.83 | 92.67 | 8.94 |
| AD-1526870.1 | 52.26 | 6.97 | 61.78 | 16.63 | 74.55 | 11.34 |
| AD-1527079.1 | 66.63 | 5.30 | 56.63 | 8.12 | 65.30 | 10.65 |
| AD-1526872.1 | 81.52 | 21.99 | 97.98 | 23.74 | 97.53 | 20.83 |
| AD-1527033.1 | 36.32 | 6.98 | 43.57 | 11.62 | 66.36 | 8.84 |
| AD-1526873.1 | 50.66 | 17.75 | 76.37 | 25.11 | 75.14 | 15.36 |
| AD-1526874.1 | 61.81 | 21.37 | 58.95 | 14.17 | 66.90 | 13.22 |
| AD-1526875.1 | 69.98 | 18.02 | 72.67 | 12.59 | 73.62 | 5.71 |
| AD-1527034.1 | 47.75 | 7.68 | 42.36 | 8.05 | 49.63 | 7.23 |
| AD-1526876.1 | 65.23 | 12.07 | 65.93 | 4.99 | 80.48 | 13.12 |
| AD-1527035.1 | 47.42 | 11.93 | 47.32 | 12.08 | 62.01 | 11.41 |
| AD-1526877.1 | 39.19 | 12.06 | 33.81 | 10.57 | 44.37 | 9.48 |
| AD-1526879.1 | 79.39 | 3.62 | 73.02 | 17.99 | 88.00 | 17.18 |
| AD-1527080.1 | 85.10 | 11.96 | 99.12 | 15.42 | 115.01 | 14.90 |
| AD-1526881.1 | 90.28 | 11.62 | 103.66 | 21.57 | 130.93 | 25.53 |
| AD-1527036.1 | 48.44 | 9.35 | 53.17 | 8.93 | 81.56 | 14.38 |
| AD-1526882.1 | 91.58 | 23.91 | 87.86 | 19.79 | 115.15 | 22.47 |
| AD-1526883.1 | 70.76 | 10.26 | 65.66 | 22.65 | 89.94 | 18.26 |
| AD-1526884.1 | 35.39 | 8.12 | 39.49 | 15.92 | 26.75 | 3.54 |
| AD-1527081.1 | 85.03 | 13.16 | 97.43 | 16.77 | 97.22 | 10.69 |
| AD-1526886.1 | 39.17 | 6.14 | 46.36 | 15.45 | 76.31 | 14.07 |
| AD-1527082.1 | 48.33 | 9.22 | 42.60 | 13.98 | 68.22 | 11.57 |
| AD-1526888.1 | 54.42 | 10.08 | 57.18 | 13.04 | 65.69 | 18.35 |
| AD-1527093.1 | 73.36 | 8.54 | 54.15 | 4.59 | 70.52 | 24.04 |
| AD-1527094.1 | 60.52 | 15.96 | 38.64 | 2.46 | 83.91 | 20.14 |
| AD-1526889.1 | 46.40 | 6.96 | 59.71 | 11.32 | 71.80 | 18.46 |
| AD-1526889.2 | 50.65 | 12.33 | 74.22 | 12.55 | 74.32 | 19.94 |
| AD-1526890.1 | 59.61 | 10.37 | 97.12 | 11.00 | 73.13 | 3.94 |
| AD-1526890.2 | 61.72 | 16.73 | 72.61 | 12.90 | 87.53 | 13.72 |
| AD-1526891.2 | 26.30 | 3.55 | 38.57 | 8.83 | 38.00 | 9.87 |
| AD-1526891.1 | 27.33 | 2.65 | 37.83 | 9.34 | 38.39 | 3.18 |
| AD-1526892.1 | 26.27 | 8.01 | 33.30 | 5.34 | 43.32 | 7.28 |
| AD-1526892.2 | 29.29 | 3.46 | 37.67 | 3.72 | 48.04 | 13.69 |
| AD-1526893.1 | 73.13 | 8.49 | 103.27 | 22.31 | 97.55 | 16.62 |
| AD-1527095.1 | 20.67 | 5.29 | 31.63 | 8.74 | 35.71 | 12.63 |
| AD-1527096.1 | 19.75 | 5.12 | 18.43 | 5.22 | 26.09 | 8.19 |
| AD-1526894.1 | 47.38 | 5.23 | 65.17 | 17.17 | 78.92 | 11.25 |
| AD-1526895.1 | 58.79 | 11.88 | 75.42 | 8.71 | 83.01 | 13.98 |
| AD-1526896.1 | 37.60 | 5.77 | 48.70 | 7.47 | 64.91 | 8.35 |
| AD-1526898.1 | 41.37 | 4.16 | 35.94 | 11.36 | 59.85 | 8.13 |
| AD-1526897.1 | 36.62 | 8.02 | 44.33 | 7.62 | 68.90 | 4.70 |
| AD-1527041.1 | 31.86 | 4.29 | 26.68 | 6.29 | 41.71 | 11.80 |
| AD-1526899.1 | 52.76 | 9.00 | 56.94 | 6.25 | 81.20 | 14.10 |
| AD-1526900.1 | 68.51 | 7.39 | 91.20 | 9.66 | 100.36 | 26.35 |
| AD-1526901.1 | 58.91 | 12.19 | 73.47 | 9.70 | 92.78 | 27.89 |
| AD-1526902.1 | 24.64 | 7.82 | 26.16 | 3.46 | 30.78 | 8.56 |
| AD-1526903.1 | 25.18 | 5.60 | 28.52 | 8.58 | 37.75 | 4.38 |
| AD-1193350.9 | 19.83 | 2.88 | 17.02 | 1.92 | 27.69 | 8.58 |
| AD-519347.6 | 26.57 | 3.65 | 30.33 | 7.02 | 41.15 | 11.70 |
| AD-1193350.10 | 15.97 | 1.12 | 18.84 | 2.78 | 26.52 | 7.81 |
| AD-519347.7 | 21.74 | 5.32 | 28.47 | 5.19 | 38.39 | 7.80 |
| AD-1193350.11 | 22.84 | 2.94 | 36.40 | 5.15 | 20.97 | 8.90 |
| AD-519347.8 | 27.13 | 1.65 | 42.41 | 10.72 | 41.20 | 3.09 |
| AD-1193350.12 | 14.56 | 4.45 | 17.60 | 2.96 | 29.05 | 2.48 |
| AD-519347.9 | 25.72 | 4.25 | 32.93 | 10.71 | 33.65 | 5.33 |
| AD-1193365.9 | 33.15 | 7.07 | 30.85 | 5.72 | 54.76 | 17.64 |
| AD-1193365.10 | 31.48 | 5.87 | 64.54 | 10.60 | 43.82 | 14.24 |
| AD-1193365.11 | 64.38 | 10.43 | 36.53 | 4.64 | 82.74 | 40.60 |
| AD-1193365.12 | 33.51 | 8.14 | 42.26 | 6.34 | 38.39 | 7.06 |
| AD-519351.16 | 26.85 | 7.10 | 32.60 | 3.49 | 36.91 | 8.64 |
| AD-519351.17 | 28.37 | 3.16 | 39.80 | 3.44 | 43.55 | 4.19 |
| AD-519351.18 | 40.69 | 10.42 | 48.84 | 4.70 | 35.31 | 8.44 |
| AD-519351.19 | 30.20 | 3.43 | 30.03 | 7.85 | 39.81 | 7.46 |
| AD-1527042.1 | 69.28 | 11.64 | 70.88 | 13.22 | 88.52 | 8.89 |
| AD-1526904.1 | 71.25 | 9.69 | 74.70 | 16.37 | 83.09 | 13.21 |
| AD-1526905.1 | 66.61 | 4.88 | 69.11 | 15.35 | 88.21 | 13.41 |
| AD-1526906.1 | 56.16 | 8.67 | 79.89 | 22.67 | 66.82 | 15.00 |
| AD-1526907.1 | 48.94 | 6.87 | 74.13 | 14.64 | 78.81 | 17.98 |
| AD-1526907.2 | 56.67 | 6.73 | 61.46 | 3.64 | 98.85 | 16.51 |
| AD-1526908.2 | 35.29 | 12.25 | 45.50 | 9.46 | 26.51 | 10.59 |
| AD-1526908.1 | 50.58 | 11.73 | 43.79 | 1.50 | 56.40 | 11.03 |
| AD-1527097.2 | 35.86 | 6.58 | 46.39 | 5.52 | 67.17 | 24.56 |
| AD-1527097.1 | 40.57 | 4.87 | 60.30 | 2.84 | 68.97 | 8.22 |
| AD-1527044.1 | 57.85 | 16.21 | 81.64 | 22.04 | 109.62 | 26.86 |
| AD-1527083.2 | 38.26 | 4.61 | 31.59 | 7.50 | 27.70 | 7.97 |
| AD-1527083.1 | 42.67 | 14.90 | 30.03 | 10.63 | 30.67 | 10.77 |
| AD-1527045.1 | 71.19 | 12.59 | 85.97 | 24.54 | 82.85 | 30.20 |
| AD-1526910.1 | 23.93 | 4.40 | 25.72 | 4.82 | 33.59 | 12.10 |
| AD-1527084.1 | 44.66 | 6.88 | 29.63 | 6.94 | 49.48 | 12.35 |
| AD-1526912.1 | 70.21 | 22.31 | 77.54 | 30.44 | 87.11 | 16.30 |
| AD-1526913.1 | 42.19 | 8.29 | 50.45 | 6.62 | 69.49 | 8.42 |
| AD-1526914.1 | 104.95 | 16.06 | 77.35 | 13.27 | 90.73 | 4.65 |
| AD-1526915.1 | 35.35 | 10.75 | 60.67 | 9.10 | 125.24 | 29.74 |
| AD-1527046.1 | 52.52 | 6.48 | 62.17 | 8.66 | 74.69 | 17.20 |
| AD-1526917.1 | 57.31 | 18.57 | 63.58 | 15.61 | 66.44 | 9.92 |
| AD-1526919.1 | 80.77 | 12.63 | 98.56 | 23.73 | 38.89 | 9.25 |
| AD-1526918.1 | 74.94 | 6.02 | 58.52 | 10.31 | 46.49 | 7.42 |
| AD-1527047.1 | 24.59 | 3.30 | 37.06 | 8.03 | 43.42 | 13.50 |
| AD-1527047.2 | 30.55 | 3.44 | 35.86 | 10.15 | 45.17 | 8.64 |
| AD-1526920.1 | 61.58 | 18.94 | 57.10 | 9.21 | 35.75 | 10.71 |
| AD-1526921.1 | 102.19 | 29.02 | 85.36 | 21.12 | 145.13 | 6.40 |
| AD-1527098.1 | 29.05 | 4.12 | 33.61 | 3.29 | 34.05 | 6.41 |
| AD-1527049.1 | 33.44 | 4.86 | 39.91 | 1.34 | 41.11 | 6.52 |
| AD-1527049.2 | 39.83 | 4.89 | 46.07 | 9.74 | 41.73 | 11.80 |
| AD-1527086.1 | 31.72 | 10.14 | 49.16 | 11.72 | 57.41 | 16.44 |
| AD-1527086.2 | 46.85 | 8.40 | 48.51 | 9.22 | 49.68 | 12.11 |
| AD-1526923.1 | 51.84 | 16.26 | 51.24 | 8.13 | 83.67 | 13.66 |
| AD-1526924.1 | 57.09 | 11.77 | 62.81 | 5.92 | 96.33 | 19.02 |
| AD-1526925.2 | 44.01 | 14.29 | 36.79 | 2.99 | 59.96 | 14.22 |
| AD-1526925.1 | 48.01 | 3.47 | 47.81 | 9.92 | 46.94 | 4.43 |
| AD-1526926.1 | 70.07 | 5.64 | 52.70 | 5.35 | 70.70 | 7.13 |
| AD-1526927.1 | 47.81 | 2.49 | 58.77 | 6.43 | 69.57 | 7.08 |
| AD-1526927.2 | 56.29 | 0.00 | 46.16 | 5.64 | 80.25 | 15.03 |
| AD-1526928.2 | 80.41 | 4.92 | 76.85 | 9.50 | 74.52 | 6.25 |
| AD-1526928.1 | 120.37 | 13.77 | 125.17 | 17.23 | 129.65 | 18.69 |
| AD-1527050.1 | 59.64 | 9.54 | 69.52 | 15.37 | 69.72 | 11.61 |
| AD-1527051.1 | 29.34 | 4.64 | 39.39 | 8.75 | 34.97 | 5.60 |
| AD-1526929.1 | 77.77 | 12.03 | 65.94 | 6.15 | 75.93 | 9.50 |
| AD-1527052.1 | 38.34 | 4.16 | 39.46 | 8.19 | 38.07 | 7.92 |
| AD-1526930.1 | 74.06 | 5.92 | 86.66 | 7.80 | 96.25 | 11.80 |
| AD-1526931.1 | 79.98 | 15.32 | 86.70 | 9.76 | 98.04 | 21.38 |
| AD-1526933.1 | 91.83 | 22.91 | 86.26 | 21.32 | 114.31 | 6.72 |
| AD-1526932.1 | 68.39 | 15.13 | 99.38 | 14.14 | 140.85 | 37.77 |
| AD-1527099.1 | 30.77 | 4.98 | 47.96 | 3.67 | 58.78 | 4.10 |
| AD-1526934.1 | 50.00 | 5.48 | 70.49 | 13.68 | 89.89 | 25.03 |
| AD-1527087.1 | 60.71 | 6.79 | 44.82 | 9.21 | 57.70 | 12.06 |
| AD-1527088.1 | 44.34 | 4.55 | 38.97 | 7.61 | 42.12 | 5.32 |
| AD-1526937.1 | 35.46 | 5.10 | 32.39 | 7.46 | 51.22 | 3.94 |
| AD-1526938.1 | 62.67 | 12.83 | 59.88 | 6.11 | 73.73 | 16.85 |
| AD-1526939.1 | 41.41 | 8.36 | 42.00 | 7.05 | 38.97 | 8.50 |
| AD-1526940.1 | 114.31 | 19.22 | 93.01 | 17.95 | 100.44 | 19.35 |
| AD-1527054.1 | 77.09 | 3.84 | 68.84 | 7.98 | 64.71 | 17.39 |
| AD-1526941.1 | 32.43 | 8.36 | 45.02 | 5.73 | 43.72 | 9.21 |
| AD-1526942.1 | 90.78 | 8.41 | 73.93 | 7.12 | 87.90 | 15.68 |
| AD-1526943.1 | 47.50 | 3.39 | 47.64 | 2.26 | 33.78 | 7.10 |
| AD-1526945.1 | 63.06 | 10.10 | 57.15 | 10.06 | 82.33 | 13.93 |
| AD-1526944.1 | 74.60 | 15.73 | 70.95 | 9.81 | 112.93 | 9.18 |
| AD-1526946.1 | 69.13 | 6.02 | 64.43 | 13.35 | 86.59 | 13.92 |
| AD-1527100.1 | 34.40 | 5.85 | 36.48 | 7.14 | 38.75 | 8.27 |
| AD-1526947.1 | 89.86 | 15.67 | 90.06 | 26.39 | 162.30 | 14.02 |
| AD-1527056.1 | 53.37 | 4.18 | 74.12 | 24.19 | 39.90 | 19.08 |
| AD-1526948.1 | 75.94 | 12.20 | 77.85 | 19.57 | 138.95 | 33.74 |
| AD-1527057.1 | 32.17 | 6.04 | 60.11 | 11.52 | 46.60 | 16.07 |
| AD-1526949.1 | 46.38 | 4.62 | 48.59 | 5.45 | 51.64 | 14.71 |
| AD-1526951.1 | 70.86 | 9.36 | 73.91 | 9.88 | 80.51 | 17.22 |
| AD-1526950.1 | 60.97 | 13.46 | 68.29 | 8.35 | 91.01 | 16.62 |
| AD-1526952.1 | 83.27 | 18.16 | 66.43 | 5.00 | 74.40 | 15.55 |
| AD-1527058.1 | 50.74 | 6.56 | 61.71 | 16.11 | 76.82 | 8.21 |
| AD-1526953.1 | 33.40 | 6.71 | 45.82 | 7.55 | 72.96 | 13.99 |
| AD-1526954.1 | 37.60 | 2.76 | 31.57 | 7.63 | 62.19 | 14.23 |
| AD-1527059.1 | 59.96 | 12.38 | 79.54 | 10.50 | 100.56 | 30.82 |
| AD-1527060.1 | 68.73 | 9.49 | 64.10 | 18.94 | 70.01 | 15.90 |
| AD-1526955.1 | 47.36 | 6.72 | 66.12 | 8.74 | 71.33 | 16.21 |
| AD-1526956.1 | 50.96 | 4.44 | 62.17 | 10.49 | 62.93 | 11.19 |
| AD-1526957.1 | 54.20 | 5.52 | 65.17 | 12.50 | 65.39 | 7.84 |
| AD-1526958.1 | 66.00 | 6.02 | 76.24 | 9.84 | 79.36 | 13.56 |
| AD-1526959.1 | 65.35 | 17.34 | 62.64 | 10.41 | 66.10 | 12.72 |
| AD-1527061.1 | 36.97 | 3.89 | 34.38 | 4.13 | 40.94 | 8.63 |
| AD-1526960.1 | 34.21 | 7.72 | 38.13 | 5.60 | 44.04 | 4.30 |
| AD-1526961.1 | 39.44 | 2.34 | 58.35 | 3.76 | 46.72 | 3.41 |
| AD-1526962.1 | 37.16 | 11.86 | 33.93 | 1.71 | 40.87 | 2.62 |
| AD-1526963.1 | 47.14 | 8.42 | 50.89 | 11.51 | 47.69 | 5.54 |
| AD-1526964.1 | 44.73 | 7.56 | 59.95 | 12.88 | 56.96 | 8.29 |
| AD-1526965.1 | 38.62 | 2.20 | 47.35 | 7.84 | 36.55 | 9.09 |
| AD-1193373.2 | 78.34 | 7.12 | 61.65 | 18.85 | 87.36 | 12.80 |
| AD-1527101.1 | 42.34 | 3.55 | 43.87 | 14.20 | 61.45 | 26.49 |
| AD-1526967.1 | 53.76 | 10.19 | 50.61 | 12.76 | 79.97 | 22.48 |
| AD-1526968.1 | 45.80 | 8.92 | 43.88 | 10.04 | 55.49 | 11.76 |
| AD-1526969.1 | 42.24 | 1.50 | 48.21 | 7.41 | 38.74 | 6.60 |
| AD-1526970.1 | 41.97 | 3.62 | 44.01 | 9.64 | 41.95 | 6.14 |
| AD-1526971.1 | 39.41 | 4.29 | 50.87 | 3.87 | 50.42 | 8.15 |
| AD-1526972.1 | 45.05 | 2.05 | 53.79 | 5.79 | 63.66 | 12.77 |
| AD-1527102.1 | 51.67 | 4.52 | 47.13 | 8.54 | 54.43 | 14.46 |
| AD-1526973.1 | 50.42 | 6.93 | 65.74 | 12.16 | 61.14 | 10.65 |
| AD-1526974.1 | 82.55 | 20.27 | 62.51 | 9.25 | 106.57 | 12.84 |
| AD-1526975.1 | 57.05 | 7.78 | 37.85 | 1.77 | 81.29 | 16.19 |
| AD-1526976.1 | 52.41 | 6.01 | 37.91 | 6.42 | 50.93 | 15.62 |
| AD-1527103.1 | 41.12 | 4.05 | 75.42 | 19.02 | 70.06 | 31.99 |
| AD-1527104.1 | 38.50 | 13.67 | 43.20 | 5.46 | 41.19 | 15.40 |
| AD-1526977.1 | 59.65 | 9.85 | 49.94 | 9.40 | 40.05 | 6.98 |
| AD-1527105.1 | 42.00 | 11.57 | 53.50 | 17.75 | 38.02 | 13.61 |
| AD-1526978.1 | 59.23 | 8.36 | 49.05 | 5.18 | 68.40 | 13.06 |
| AD-1526979.1 | 55.62 | 8.89 | 49.31 | 7.84 | 43.97 | 6.51 |
| AD-1527089.1 | 59.84 | 20.28 | 51.08 | 5.71 | 60.93 | 11.78 |
| AD-1526981.1 | 93.29 | 22.39 | 89.26 | 5.61 | 72.67 | 17.71 |
| AD-1526982.1 | 90.26 | 9.70 | 55.21 | 13.50 | 91.27 | 21.17 |
| AD-1526983.1 | 67.33 | 10.17 | 47.69 | 4.83 | 83.36 | 15.35 |
| AD-1527067.1 | 54.11 | 13.15 | 75.54 | 14.14 | 51.97 | 21.89 |
| AD-1527068.1 | 23.04 | 9.60 | 50.31 | 16.15 | 32.88 | 5.45 |
| AD-1526984.1 | 45.16 | 6.61 | 34.84 | 9.72 | 40.42 | 11.68 |
| AD-1526985.1 | 44.84 | 8.06 | 45.62 | 11.56 | 48.95 | 4.96 |
| AD-1526986.1 | 72.17 | 7.57 | 69.28 | 13.46 | 87.93 | 25.79 |
| AD-1527106.1 | 25.90 | 3.66 | 35.37 | 10.21 | 30.39 | 1.07 |
| AD-1526987.1 | 35.67 | 4.70 | 19.52 | 2.84 | 32.75 | 11.24 |
| AD-1526988.1 | 42.34 | 6.98 | 52.61 | 7.81 | 39.72 | 7.23 |
| AD-1526989.1 | 28.65 | 9.51 | 38.74 | 4.90 | 65.47 | 13.64 |
| AD-1527107.1 | 31.90 | 5.80 | 44.77 | 11.26 | 51.67 | 6.53 |
| AD-1526990.1 | 28.23 | 10.55 | 26.21 | 10.15 | 33.94 | 9.09 |
| AD-1526991.1 | 43.52 | 15.37 | 30.74 | 6.00 | 26.58 | 6.65 |
| AD-1526992.1 | 63.96 | 7.22 | 34.20 | 6.99 | 29.03 | 2.60 |
| AD-1526993.1 | 37.16 | 7.44 | 29.90 | 5.72 | 28.05 | 4.96 |
| AD-1526994.1 | 45.33 | 12.92 | 39.80 | 11.37 | 45.51 | 7.36 |
| AD-1526995.1 | 98.43 | 7.72 | 54.68 | 16.30 | 64.47 | 10.45 |
| AD-1526996.1 | 115.72 | 19.07 | 77.30 | 11.14 | 44.02 | 14.08 |
| AD-1526997.1 | 36.28 | 10.19 | 48.61 | 15.53 | 31.35 | 11.44 |
| AD-1526999.1 | 34.13 | 8.43 | 58.17 | 16.48 | 23.79 | 4.41 |
| AD-1526998.1 | 46.80 | 6.10 | 35.97 | 5.18 | 39.02 | 15.25 |
| AD-1527000.1 | 38.25 | 12.96 | 39.42 | 17.08 | 41.33 | 13.32 |
| AD-1527001.1 | 45.79 | 6.85 | 48.25 | 18.53 | 51.02 | 14.92 |
| AD-1527002.1 | 37.87 | 8.90 | 58.60 | 5.53 | 54.16 | 20.12 |
| AD-1527003.1 | 107.12 | 17.44 | 86.62 | 8.23 | 61.41 | 21.51 |
| AD-1527108.1 | 43.45 | 6.21 | 53.56 | 18.85 | 52.10 | 7.89 |
| AD-1527004.1 | 51.39 | 5.85 | 45.91 | 12.24 | 76.63 | 17.28 |
| AD-1527005.1 | 41.64 | 2.88 | 50.23 | 8.91 | 40.48 | 4.44 |

TABLE 5
In Vitro Screen in HepG2 cells

| | HepG2 Transfection | | | | | |
|---|---|---|---|---|---|---|
| | 50 nM | | 10 nM | | 1 nM | |
| | % of | | % of | | % of | |
| | message | | message | | message | |
| | remain- | St | remain- | St | remain- | St |
| DuplexID | ing | Dev | ing | Dev | ing | Dev |
| AD-1526763.1 | 72.04 | 9.39 | 119.91 | 24.51 | 68.49 | N/A |
| AD-1527006.1 | 55.29 | 5.37 | 28.91 | 2.26 | 46.28 | 17.66 |
| AD-1526764.1 | 49.22 | 11.45 | 89.17 | 20.23 | 55.33 | 4.33 |
| AD-1526765.1 | 79.36 | 23.37 | 86.02 | 4.64 | 87.55 | 20.87 |
| AD-1526766.1 | 72.02 | 20.36 | 106.42 | 8.65 | 87.89 | 29.50 |
| AD-1526767.1 | 72.92 | 11.83 | 84.83 | 4.57 | 73.55 | 12.09 |
| AD-1527090.1 | 45.42 | 12.72 | 28.98 | 9.62 | 65.06 | 18.55 |
| AD-1526768.1 | 59.92 | 11.80 | 79.37 | 11.21 | 72.92 | 12.43 |
| AD-1526769.1 | 93.82 | 5.83 | 98.84 | 11.12 | 82.25 | 21.00 |
| AD-1526770.1 | N/A | N/A | 104.54 | 31.67 | 162.40 | 58.05 |
| AD-1527008.1 | 52.67 | 11.12 | 81.35 | 16.70 | 88.60 | 20.09 |
| AD-1526771.1 | 55.04 | 14.39 | 56.33 | 21.30 | 62.05 | 19.15 |
| AD-1526772.1 | 51.13 | 22.42 | 53.35 | 15.15 | 38.57 | 7.07 |
| AD-1527009.1 | 34.11 | 9.57 | 17.67 | 1.38 | 54.92 | 5.52 |
| AD-1526773.1 | 59.16 | 15.64 | 67.56 | 24.76 | 62.18 | 21.73 |
| AD-1527010.1 | 63.70 | 20.95 | 65.15 | 15.17 | 86.08 | 22.35 |
| AD-1527072.1 | 62.25 | 4.38 | 74.58 | 33.48 | 77.46 | 18.97 |
| AD-1527011.1 | 44.11 | 13.10 | 52.66 | 11.52 | 101.00 | 7.64 |
| AD-1527073.1 | 30.59 | 3.40 | 45.31 | 11.87 | 39.29 | 10.81 |
| AD-1527012.1 | 80.07 | 25.78 | 97.61 | 20.07 | 93.03 | 23.95 |
| AD-1526776.1 | 37.90 | 6.06 | 74.86 | 29.35 | 58.77 | 19.20 |
| AD-1526777.1 | 56.50 | 8.55 | 84.07 | 15.76 | 87.29 | 10.03 |
| AD-1526778.1 | 91.04 | 21.97 | 183.41 | 53.42 | 114.15 | 17.32 |
| AD-1527074.1 | 95.68 | 24.16 | 102.74 | 9.62 | 67.43 | 12.78 |
| AD-1526780.1 | 73.95 | 17.72 | 102.90 | 6.41 | 66.93 | 8.57 |
| AD-1526781.1 | 69.46 | 16.56 | 90.25 | 22.73 | 88.94 | 18.04 |
| AD-1527013.1 | 53.68 | 16.59 | 60.11 | 11.02 | 68.24 | 9.38 |
| AD-1526782.1 | 99.79 | 8.06 | 100.60 | 17.76 | 74.86 | 17.21 |
| AD-1527075.1 | 43.17 | 14.75 | 76.65 | 14.04 | 62.52 | 11.00 |
| AD-1527014.1 | 55.87 | 10.82 | 61.15 | 12.14 | 55.74 | 10.61 |
| AD-1526784.1 | 54.51 | 11.27 | 78.04 | 8.06 | 69.94 | 17.79 |
| AD-1526785.1 | 113.41 | 34.03 | 181.68 | 35.45 | 135.10 | 41.40 |
| AD-1526786.1 | 75.41 | 30.23 | 46.94 | 4.90 | 61.79 | 3.29 |
| AD-1526787.1 | 74.12 | 12.35 | 72.11 | 8.93 | 74.06 | 15.47 |
| AD-1526788.1 | 94.88 | 26.29 | 89.76 | 20.21 | 88.91 | 16.65 |
| AD-1526789.1 | 65.49 | 20.06 | 44.30 | 23.46 | 59.60 | 6.72 |
| AD-1526790.1 | 79.64 | 16.42 | 104.56 | 19.14 | 71.60 | 7.93 |
| AD-1526791.1 | 74.95 | 10.82 | 118.83 | 20.40 | 106.34 | 15.44 |
| AD-1526792.1 | 60.00 | 9.53 | 122.31 | 37.01 | 121.90 | 16.40 |
| AD-1526793.1 | 90.69 | 24.77 | 77.63 | 31.66 | 76.58 | 23.46 |
| AD-1527015.1 | 39.54 | 6.49 | 47.06 | 6.26 | 56.24 | 11.18 |
| AD-1527016.1 | 53.08 | 11.17 | 69.46 | 6.25 | 72.45 | 13.17 |
| AD-1526794.1 | 63.91 | 23.28 | 61.80 | 16.67 | 51.54 | 10.41 |
| AD-1527017.1 | 100.04 | 26.58 | 84.83 | 20.08 | 84.14 | 10.48 |
| AD-1526795.1 | 47.15 | 1.25 | 47.63 | 5.68 | 48.92 | 5.70 |
| AD-1526796.1 | 42.73 | 6.47 | 43.46 | 10.10 | 53.50 | 14.13 |
| AD-1526797.1 | 59.67 | 15.43 | 82.50 | 32.98 | 67.28 | 3.76 |
| AD-1527018.1 | 65.36 | 14.44 | 84.63 | 16.67 | 110.50 | 27.48 |
| AD-1526798.1 | 67.10 | 22.85 | 83.72 | 28.00 | 84.19 | 1.67 |
| AD-1526799.1 | 101.25 | 13.47 | 94.25 | 24.84 | 93.85 | 23.12 |
| AD-1526800.1 | 142.08 | 41.50 | 234.02 | 38.41 | 133.77 | 35.44 |
| AD-1526801.1 | 81.04 | 21.80 | 76.52 | 4.82 | 76.11 | 12.53 |
| AD-1526802.1 | 87.50 | 9.48 | 74.53 | 4.15 | 71.64 | 4.58 |
| AD-1526803.1 | 89.53 | 5.60 | 71.24 | 24.61 | 46.00 | 11.21 |
| AD-1526804.1 | 125.39 | 24.45 | 79.25 | 9.16 | 75.65 | 6.12 |
| AD-1526805.1 | 106.44 | 14.32 | 102.76 | 17.73 | 84.03 | 8.25 |
| AD-1526806.1 | 77.54 | 8.78 | 78.23 | 6.72 | 82.32 | 11.17 |
| AD-1526807.1 | 73.85 | 10.54 | 70.99 | 7.75 | 73.13 | 15.06 |
| AD-1526808.1 | 96.82 | 9.29 | 103.27 | 18.47 | 83.40 | 10.94 |
| AD-1526809.1 | 94.58 | 23.63 | 89.10 | 19.78 | 83.16 | 16.74 |
| AD-1526810.1 | 94.33 | 16.60 | 94.87 | 19.76 | 103.19 | 22.62 |
| AD-1526811.1 | 126.27 | 25.75 | 139.63 | 9.40 | 120.33 | 24.05 |
| AD-1526812.2 | 34.26 | 7.33 | 38.95 | 4.01 | 34.41 | 4.43 |
| AD-1526812.1 | 54.69 | 11.92 | 55.96 | 7.85 | 35.44 | 5.08 |
| AD-1527019.1 | 70.23 | 4.96 | 56.39 | 16.47 | 55.17 | 16.00 |
| AD-1527020.2 | 47.32 | 9.36 | 40.02 | 4.12 | 45.29 | 9.48 |
| AD-1527020.1 | 39.09 | 5.34 | 34.96 | 4.83 | 35.18 | 6.18 |
| AD-1526813.1 | 41.01 | 5.60 | 33.47 | 3.62 | 43.30 | 4.46 |
| AD-1526814.1 | 54.68 | 11.71 | 45.54 | 8.90 | 47.53 | 7.83 |
| AD-1526815.1 | 80.55 | 9.21 | 61.98 | 13.21 | 94.14 | 10.03 |
| AD-1526816.1 | 39.65 | 11.30 | 35.31 | 3.51 | 47.02 | 4.42 |
| AD-1526817.1 | 53.82 | 17.16 | 43.38 | 1.71 | 45.59 | 10.05 |
| AD-1526818.1 | 52.60 | 11.60 | 81.50 | 8.19 | 113.12 | 24.47 |
| AD-1526819.1 | 96.29 | 19.64 | 98.77 | 13.64 | 70.94 | 12.64 |
| AD-1527021.1 | 91.87 | 24.67 | 76.46 | 19.00 | 74.96 | 9.51 |
| AD-1526820.2 | 52.84 | 4.55 | 47.75 | 4.30 | 38.33 | 10.66 |
| AD-1526820.1 | 62.09 | 7.92 | 37.35 | 6.75 | 36.85 | 5.87 |
| AD-1526821.1 | 64.45 | 10.73 | 55.19 | 10.05 | 51.99 | 8.64 |
| AD-1527022.1 | 51.97 | 5.65 | 36.54 | 6.35 | 50.78 | 9.18 |
| AD-1526822.1 | 54.41 | 2.55 | 53.56 | 11.74 | 56.34 | 15.43 |
| AD-1526823.1 | 51.31 | 6.89 | 45.74 | 9.63 | 39.73 | 9.38 |
| AD-1526824.1 | 47.33 | 8.32 | 66.96 | 16.86 | 55.75 | 16.38 |
| AD-1526825.1 | 41.43 | 1.62 | 37.54 | 11.73 | 48.99 | 5.30 |
| AD-1527091.1 | 82.10 | 5.99 | 77.11 | 16.44 | 104.47 | 14.85 |
| AD-1526827.1 | 56.56 | 9.29 | 40.71 | 7.87 | 39.23 | 10.32 |
| AD-1526826.1 | 53.59 | 9.34 | 41.64 | 8.29 | 44.37 | 10.50 |
| AD-1526828.1 | 52.87 | 3.27 | 40.42 | 10.50 | 47.62 | 1.54 |
| AD-1526830.1 | 83.65 | 22.87 | 60.40 | 9.57 | 63.55 | 11.89 |
| AD-1526829.1 | 75.20 | 5.66 | 72.08 | 5.86 | 72.49 | 9.10 |
| AD-1526831.1 | 43.75 | 10.90 | 65.23 | 19.86 | 54.76 | 13.46 |
| AD-1527076.1 | 56.84 | 15.95 | 49.13 | 7.40 | 54.49 | 7.39 |
| AD-1526833.1 | 42.76 | 14.74 | 27.90 | 5.96 | 35.09 | 5.54 |
| AD-1527024.1 | 71.51 | 8.72 | 76.52 | 4.87 | 114.48 | 2.24 |
| AD-1527025.1 | 39.31 | 10.29 | 56.24 | 5.12 | 42.03 | 8.96 |
| AD-1526834.1 | 75.19 | 5.35 | 49.50 | 9.79 | 71.47 | 8.80 |
| AD-1526834.2 | 80.32 | 11.25 | 34.78 | 11.56 | 60.97 | 14.75 |
| AD-1526835.2 | 39.50 | 3.96 | 34.48 | 12.59 | 44.45 | 6.41 |
| AD-1526835.1 | 45.25 | 10.51 | 24.80 | 6.67 | 39.80 | 8.29 |
| AD-1526836.1 | 46.40 | 7.55 | 38.77 | 6.39 | 28.90 | 4.03 |
| AD-1526836.2 | 59.02 | 15.37 | 39.07 | 4.52 | 39.23 | 6.31 |
| AD-1527026.1 | 43.86 | 11.91 | 23.57 | 5.67 | 38.55 | 5.99 |
| AD-1527026.2 | 33.62 | 3.88 | 29.12 | 4.01 | 36.06 | 5.35 |
| AD-1526837.2 | 33.14 | 7.45 | 32.48 | 5.17 | 35.33 | 6.60 |
| AD-1526837.1 | 26.36 | 7.10 | 42.91 | 7.51 | 27.46 | 7.11 |
| AD-1526838.1 | 29.70 | 5.60 | 26.44 | 5.68 | 39.84 | 3.18 |
| AD-1526839.1 | 33.16 | 8.30 | 32.03 | 6.44 | 43.99 | 5.80 |
| AD-1526839.2 | 40.43 | 7.83 | 29.97 | 3.51 | 54.17 | 11.19 |
| AD-1527077.1 | 67.64 | 27.05 | 77.17 | 8.64 | 62.66 | 11.30 |
| AD-1526841.1 | 64.91 | 18.66 | 60.65 | 14.05 | 65.53 | 9.68 |
| AD-1526842.1 | 105.84 | 17.04 | 80.84 | 13.68 | 124.28 | 9.13 |
| AD-1526843.1 | 67.21 | 7.42 | 90.56 | 23.36 | 51.54 | 14.46 |
| AD-1526844.1 | 93.43 | 15.05 | 112.40 | 36.81 | 68.34 | 17.45 |
| AD-1526845.1 | 35.15 | 9.38 | 30.92 | 3.63 | 31.90 | 8.81 |
| AD-1527027.1 | 34.05 | 2.60 | 27.18 | 7.03 | 32.54 | 6.00 |
| AD-1527027.2 | 48.23 | 8.67 | 56.91 | 3.13 | 52.37 | 8.16 |
| AD-1527028.1 | 64.54 | 8.74 | 70.68 | 7.92 | 63.85 | 12.76 |
| AD-1527028.2 | 74.30 | 3.69 | 69.07 | 8.79 | 64.89 | 9.62 |
| AD-1526846.2 | 19.81 | 8.79 | 55.48 | 12.40 | 68.41 | 20.96 |
| AD-1526846.1 | 14.19 | 3.38 | 39.64 | 6.00 | 50.37 | 11.50 |
| AD-1526847.1 | 54.81 | 19.46 | 38.91 | 15.76 | 42.03 | 17.92 |
| AD-1526847.2 | 32.08 | 5.21 | 56.05 | 20.15 | 113.54 | 24.35 |
| AD-1526848.1 | 41.17 | 5.83 | 90.45 | 21.90 | 102.64 | 5.03 |
| AD-1526848.2 | 84.66 | 12.40 | 88.99 | 8.44 | 110.82 | 29.23 |
| AD-1526849.1 | 67.89 | 21.05 | 80.06 | 17.67 | 68.23 | 20.79 |
| AD-1526849.2 | 63.66 | 14.09 | 69.78 | 17.08 | 120.48 | 14.07 |
| AD-1527029.2 | 67.13 | 20.75 | 80.64 | 15.04 | 65.11 | 10.54 |
| AD-1527029.1 | 85.97 | 23.88 | 109.98 | 7.19 | 82.94 | 13.31 |
| AD-1526850.1 | 59.86 | 20.44 | 58.11 | 5.64 | 78.03 | 23.35 |
| AD-1526850.2 | 61.09 | 19.93 | 55.07 | 12.15 | 83.34 | 8.49 |
| AD-1527092.2 | 53.90 | 9.46 | 62.03 | 6.41 | 58.41 | 7.85 |
| AD-1527092.1 | 51.45 | 5.18 | 66.60 | 13.84 | 56.13 | 5.07 |
| AD-1527031.1 | 82.19 | 7.41 | 84.87 | 21.78 | 79.23 | 17.70 |
| AD-1527031.2 | 102.35 | 10.87 | 98.88 | 8.20 | 84.48 | 12.52 |
| AD-1526851.2 | 156.84 | 48.56 | 70.79 | N/A | 121.00 | 38.56 |
| AD-1526851.1 | 96.87 | 20.51 | 112.22 | 39.31 | 104.98 | 9.03 |
| AD-1526852.2 | 61.47 | 14.92 | 35.30 | 7.54 | 55.34 | 8.60 |
| AD-1526852.1 | 79.08 | 6.50 | 56.09 | 8.13 | 71.84 | 11.09 |
| AD-1526853.1 | 69.89 | 9.72 | 66.12 | 3.41 | 83.57 | 15.97 |
| AD-1526854.1 | 113.31 | 31.53 | 117.58 | 16.93 | 106.24 | 23.61 |
| AD-1526855.1 | 82.44 | 16.24 | 115.21 | 13.88 | 112.38 | 12.31 |
| AD-1526856.1 | 55.67 | 11.02 | 97.43 | 19.23 | 96.28 | 14.95 |
| AD-1526857.1 | 124.85 | 12.29 | 118.66 | 18.74 | 113.64 | 16.65 |
| AD-1526859.1 | 61.43 | 17.58 | 78.26 | 7.23 | 82.12 | 22.16 |
| AD-1526858.1 | 88.11 | 19.14 | 115.36 | 25.08 | 116.52 | 28.53 |
| AD-1526860.1 | 77.90 | 12.12 | 68.28 | 19.44 | 83.26 | 9.46 |
| AD-1527032.1 | 42.71 | 9.63 | 42.23 | 5.67 | 51.96 | 7.38 |
| AD-1526861.1 | 72.00 | 17.72 | 93.92 | 21.32 | 100.44 | 9.64 |
| AD-1527078.1 | 69.35 | 13.90 | 69.29 | 15.88 | 90.57 | 27.49 |
| AD-1526863.1 | 118.92 | 17.99 | 122.09 | 27.91 | 146.26 | 27.51 |
| AD-1526864.1 | 137.25 | 47.34 | 104.82 | 5.17 | 117.73 | 24.28 |
| AD-1526865.1 | 96.13 | 12.92 | 125.19 | 18.90 | 128.06 | 2.66 |
| AD-1526866.1 | 106.34 | 13.79 | 94.77 | 14.11 | 29.69 | 2.89 |
| AD-1526867.1 | 77.23 | 19.16 | 99.39 | 13.03 | 86.04 | 16.68 |
| AD-1526868.1 | 71.69 | 18.56 | 77.28 | 14.32 | 67.62 | 11.84 |
| AD-1526869.1 | 134.64 | 18.79 | 129.87 | 20.05 | 98.61 | 17.00 |
| AD-1526870.1 | 73.71 | 13.20 | 68.65 | 11.17 | 109.10 | 5.61 |
| AD-1527079.1 | 72.48 | 13.01 | 76.56 | 12.66 | 73.32 | 11.09 |
| AD-1526872.1 | 197.77 | 61.77 | 114.23 | 28.70 | 122.85 | 19.09 |
| AD-1527033.1 | 60.59 | 8.70 | 54.07 | 5.24 | 60.53 | 2.34 |
| AD-1526873.1 | 89.93 | 14.51 | 74.78 | 16.09 | 119.75 | 21.83 |
| AD-1526874.1 | 29.46 | 11.75 | 44.48 | 5.80 | 62.32 | 17.72 |
| AD-1526875.1 | 69.69 | 16.49 | 66.84 | 8.32 | 97.12 | 18.83 |
| AD-1527034.1 | 51.72 | 6.35 | 68.16 | 10.22 | 73.47 | 13.27 |
| AD-1526876.1 | 92.65 | 29.29 | 90.32 | 16.92 | 77.56 | 10.26 |
| AD-1527035.1 | 66.74 | 9.75 | 65.18 | 6.17 | 69.83 | 4.21 |
| AD-1526877.1 | 50.12 | 7.95 | 44.46 | 7.43 | 63.36 | 7.18 |
| AD-1526879.1 | 93.50 | 9.62 | 80.47 | 26.57 | 87.55 | 11.21 |
| AD-1527080.1 | 101.40 | 19.75 | 95.86 | 23.60 | 104.53 | 14.22 |
| AD-1526881.1 | 114.83 | 16.49 | 90.61 | 19.52 | 108.60 | 12.76 |
| AD-1527036.1 | 68.21 | 3.80 | 69.36 | 4.51 | 87.05 | 8.32 |
| AD-1526882.1 | 78.06 | 7.99 | 97.66 | 5.45 | 115.74 | 10.14 |
| AD-1526883.1 | 67.56 | 13.72 | 123.22 | 11.31 | 140.00 | 30.48 |
| AD-1526884.1 | 44.97 | 14.01 | 40.30 | 13.38 | 59.62 | 11.52 |
| AD-1527081.1 | 77.12 | 29.18 | 83.85 | 7.40 | 78.56 | 16.22 |
| AD-1526886.1 | 54.60 | 12.49 | 53.33 | 11.65 | 63.83 | 8.07 |
| AD-1527082.1 | 51.22 | 8.97 | 47.60 | 13.18 | 65.10 | 17.85 |
| AD-1526888.1 | 44.74 | 14.10 | 48.37 | 10.69 | 62.68 | 3.73 |
| AD-1527093.1 | 71.29 | 13.83 | 81.60 | 11.67 | 69.52 | 2.26 |
| AD-1527094.1 | 62.26 | 15.66 | 57.03 | 11.73 | 30.53 | 7.70 |
| AD-1526889.1 | 48.74 | 15.57 | 50.31 | 7.56 | 73.63 | 15.74 |
| AD-1526889.2 | 64.21 | 2.70 | 56.28 | 7.31 | 72.95 | 18.52 |
| AD-1526890.1 | 83.16 | 18.51 | 61.37 | 12.15 | 113.73 | 31.23 |
| AD-1526890.2 | 70.45 | 15.83 | 93.38 | 13.91 | 98.14 | 18.54 |
| AD-1526891.2 | 39.73 | 9.29 | 38.11 | 12.48 | 49.27 | 5.55 |
| AD-1526891.1 | 45.34 | 13.91 | 33.08 | 10.03 | 53.22 | 4.11 |
| AD-1526892.1 | 32.27 | 10.06 | 30.02 | 10.35 | 53.07 | 15.64 |
| AD-1526892.2 | 31.49 | 4.69 | 35.33 | 7.11 | 61.99 | 10.14 |
| AD-1526893.1 | 72.42 | 24.61 | 98.88 | 12.77 | 91.56 | 19.55 |
| AD-1527095.1 | 34.37 | 4.84 | 32.69 | 3.02 | 36.26 | 6.42 |
| AD-1527096.1 | 32.56 | 2.78 | 38.48 | 7.54 | 38.33 | 9.33 |
| AD-1526894.1 | 75.53 | 8.91 | 64.50 | 12.26 | 97.18 | 35.53 |
| AD-1526895.1 | 75.08 | 5.29 | 46.33 | 7.72 | 83.49 | 10.45 |
| AD-1526896.1 | 49.87 | 4.19 | 49.21 | 7.26 | 62.47 | 16.89 |
| AD-1526898.1 | 34.54 | 10.71 | 42.97 | 4.95 | 53.88 | 7.99 |
| AD-1526897.1 | 51.79 | 13.91 | 56.66 | 11.74 | 74.84 | 17.51 |
| AD-1527041.1 | 44.44 | 9.02 | 35.68 | 4.54 | 45.70 | 10.68 |
| AD-1526899.1 | 51.47 | 13.53 | 66.54 | 7.96 | 82.72 | 16.09 |
| AD-1526900.1 | 64.65 | 13.05 | 78.22 | 12.08 | 81.93 | 13.37 |
| AD-1526901.1 | 67.63 | 15.43 | 62.75 | 9.96 | 120.21 | 20.67 |
| AD-1526902.1 | 23.65 | 3.15 | 27.97 | 7.17 | 41.11 | 4.41 |
| AD-1526903.1 | 28.30 | 6.55 | 35.76 | 5.21 | 44.02 | 6.40 |
| AD-1193350.9 | 20.68 | 3.97 | 16.51 | 0.87 | 29.05 | 4.81 |
| AD-519347.6 | 25.67 | 4.87 | 39.90 | 7.45 | 44.46 | 9.12 |
| AD-1193350.10 | 27.30 | 4.46 | 28.88 | 6.06 | 28.16 | 3.69 |
| AD-519347.7 | 36.27 | 4.69 | 37.37 | 6.56 | 46.99 | 11.13 |
| AD-1193350.11 | 28.91 | 2.99 | 28.76 | 2.84 | 34.68 | 7.69 |
| AD-519347.8 | 31.01 | 3.63 | 36.43 | 5.87 | 40.90 | 10.08 |
| AD-1193350.12 | 22.16 | 3.76 | 24.68 | 2.88 | 37.15 | 3.51 |
| AD-519347.9 | 32.77 | 7.62 | 35.27 | 4.91 | 45.75 | 8.60 |
| AD-1193365.9 | 37.65 | 13.28 | 34.29 | 9.29 | 40.76 | 1.77 |
| AD-1193365.10 | 39.63 | 12.25 | 44.53 | 9.93 | 28.80 | 9.19 |
| AD-1193365.11 | 43.71 | 16.38 | 41.31 | 13.94 | 38.34 | 8.54 |
| AD-1193365.12 | 38.36 | 3.37 | 31.68 | 9.73 | 55.69 | 13.55 |
| AD-519351.16 | 29.22 | 5.65 | 38.15 | 9.70 | 39.52 | 4.23 |
| AD-519351.17 | 30.21 | 1.06 | 36.41 | 6.74 | 40.03 | 5.77 |
| AD-519351.18 | 39.12 | 14.84 | 32.70 | 9.62 | 25.65 | 2.54 |
| AD-519351.19 | 30.10 | 2.93 | 32.27 | 12.67 | 46.65 | 3.60 |
| AD-1527042.1 | 85.47 | 10.31 | 106.77 | 24.93 | 87.63 | 11.50 |
| AD-1526904.1 | 68.16 | 12.90 | 68.36 | 4.28 | 68.63 | 1.50 |
| AD-1526905.1 | 67.99 | 17.75 | 69.85 | 13.44 | 65.61 | 6.44 |
| AD-1526906.1 | 61.73 | 16.58 | 58.29 | 22.12 | 78.85 | 9.94 |
| AD-1526907.1 | 44.23 | 13.89 | 53.11 | 9.67 | 80.79 | 10.22 |
| AD-1526907.2 | 44.78 | 5.60 | 49.08 | 4.21 | 57.21 | 8.42 |
| AD-1526908.2 | 16.65 | 3.99 | 21.33 | 6.71 | 43.85 | 10.07 |
| AD-1526908.1 | 69.29 | 14.22 | 53.81 | 3.09 | 65.13 | 11.02 |
| AD-1527097.2 | 65.33 | 9.17 | 61.12 | 11.04 | 61.89 | 13.71 |
| AD-1527097.1 | 49.78 | 6.31 | 68.26 | 3.70 | 64.08 | 10.67 |
| AD-1527044.1 | 90.13 | 12.71 | 95.41 | 10.78 | 103.25 | 20.72 |
| AD-1527083.2 | 30.49 | 4.80 | 28.38 | 2.37 | 43.88 | 5.87 |
| AD-1527083.1 | 28.94 | 6.62 | 27.81 | 10.02 | 45.12 | 4.28 |
| AD-1527045.1 | 52.07 | 12.94 | 76.77 | 13.35 | 63.04 | 14.69 |
| AD-1526910.1 | 41.63 | 8.61 | 53.82 | 13.57 | 51.90 | 7.54 |
| AD-1527084.1 | 36.92 | 4.33 | 44.16 | 8.47 | 54.17 | 5.93 |
| AD-1526912.1 | 51.84 | 8.12 | 59.88 | 22.39 | 78.49 | 17.06 |
| AD-1526913.1 | 44.72 | 7.90 | 72.64 | 11.98 | 54.79 | 14.20 |
| AD-1526914.1 | 44.94 | 19.57 | 77.52 | 23.92 | 71.53 | 26.33 |
| AD-1526915.1 | 54.39 | 16.39 | 66.70 | 16.14 | 83.83 | 26.69 |
| AD-1527046.1 | 69.09 | 16.85 | 66.66 | 9.64 | 76.99 | 19.10 |
| AD-1526917.1 | 49.98 | 14.45 | 61.88 | 5.84 | 81.45 | 16.66 |
| AD-1526919.1 | 64.64 | 19.69 | 78.96 | 21.82 | 75.86 | 11.18 |
| AD-1526918.1 | 38.62 | 8.81 | 59.74 | 13.71 | 88.79 | 28.03 |
| AD-1527047.1 | 52.53 | 4.34 | 51.19 | 11.48 | 51.11 | 15.73 |
| AD-1527047.2 | 41.09 | 4.81 | 47.28 | 8.46 | 41.01 | 5.17 |
| AD-1526920.1 | 46.98 | 6.69 | 41.70 | 14.11 | 39.10 | 4.98 |
| AD-1526921.1 | 76.29 | 10.84 | 100.44 | 32.43 | 67.45 | 19.36 |
| AD-1527098.1 | 47.13 | 7.24 | 44.45 | 9.17 | 34.66 | 5.78 |
| AD-1527049.1 | 60.15 | 12.17 | 54.88 | 6.06 | 43.23 | 9.49 |
| AD-1527049.2 | 48.37 | 5.70 | 50.53 | 4.90 | 54.03 | 6.09 |
| AD-1527086.1 | 36.71 | 7.14 | 37.51 | 10.86 | 61.34 | 14.65 |
| AD-1527086.2 | 36.75 | 7.80 | 42.79 | 5.35 | 61.66 | 7.86 |
| AD-1526923.1 | 55.29 | 7.63 | 59.45 | 10.49 | 133.47 | 8.66 |
| AD-1526924.1 | 50.61 | 13.65 | 76.32 | 9.40 | 97.91 | 17.43 |
| AD-1526925.2 | 39.40 | 6.36 | 30.60 | 6.23 | 70.23 | 13.72 |
| AD-1526925.1 | 36.38 | 8.74 | 37.13 | 8.66 | 81.75 | 14.09 |
| AD-1526926.1 | 76.01 | 18.74 | 76.98 | 24.77 | 116.06 | 4.33 |
| AD-1526927.1 | 53.12 | 14.93 | 66.25 | 16.23 | 65.67 | 9.19 |
| AD-1526927.2 | 65.43 | 12.00 | 64.59 | 1.29 | 89.14 | 14.00 |
| AD-1526928.2 | 73.45 | 13.40 | 83.74 | 13.31 | 100.15 | 12.13 |
| AD-1526928.1 | 62.72 | 18.73 | 94.66 | 26.61 | 109.71 | 21.10 |
| AD-1527050.1 | 59.29 | 12.88 | 66.90 | 7.24 | 55.00 | 3.77 |
| AD-1527051.1 | 31.86 | 2.99 | 42.10 | 8.84 | 31.71 | 4.30 |
| AD-1526929.1 | 62.38 | 3.85 | 80.12 | 14.74 | 111.12 | 15.12 |
| AD-1527052.1 | 50.88 | 3.60 | 47.37 | 6.78 | 45.28 | 2.61 |
| AD-1526930.1 | 65.41 | 16.82 | 122.05 | 28.07 | 122.31 | 17.19 |
| AD-1526931.1 | 79.41 | 12.54 | 89.14 | 6.07 | 114.36 | 6.89 |
| AD-1526933.1 | 76.80 | 22.82 | 50.97 | 6.30 | 83.25 | 17.11 |
| AD-1526932.1 | 72.60 | 15.38 | 92.45 | 1.48 | 134.89 | 25.86 |
| AD-1527099.1 | 41.58 | 6.52 | 61.20 | 3.42 | 52.70 | 5.63 |
| AD-1526934.1 | 43.90 | 5.59 | 47.77 | 12.31 | 67.36 | 16.11 |
| AD-1527087.1 | 56.85 | 10.43 | 56.96 | 12.12 | 85.63 | 14.05 |
| AD-1527088.1 | 47.52 | 5.25 | 50.25 | 12.29 | 54.99 | 4.37 |
| AD-1526937.1 | 44.20 | 8.91 | 47.88 | 1.83 | 67.46 | 13.82 |
| AD-1526938.1 | 54.00 | 9.43 | 74.33 | 18.89 | 103.14 | 23.62 |
| AD-1526939.1 | 42.07 | 18.59 | 57.75 | 11.52 | 59.00 | 17.12 |
| AD-1526940.1 | 72.58 | 16.32 | 72.16 | 12.45 | 76.29 | 16.08 |
| AD-1527054.1 | 79.74 | 18.00 | 98.93 | 8.92 | 72.27 | 5.77 |
| AD-1526941.1 | 54.12 | 12.89 | 55.96 | 2.02 | 77.41 | 9.83 |
| AD-1526942.1 | 68.50 | 10.87 | 60.51 | 11.82 | 79.49 | 15.69 |
| AD-1526943.1 | 55.90 | 14.56 | 56.85 | 8.29 | 81.36 | 14.79 |
| AD-1526945.1 | 45.50 | 8.54 | 48.87 | 9.61 | 70.64 | 4.25 |
| AD-1526944.1 | 46.65 | 21.17 | 53.27 | 16.49 | 90.96 | 9.65 |
| AD-1526946.1 | 78.38 | 11.30 | 85.47 | 15.22 | 110.22 | 14.45 |
| AD-1527100.1 | 36.40 | 5.71 | 48.44 | 4.23 | 45.70 | 2.90 |
| AD-1526947.1 | 67.67 | 15.64 | 94.90 | 9.61 | 118.31 | 33.99 |
| AD-1527056.1 | 34.72 | 6.01 | 55.06 | 7.96 | 44.18 | 3.52 |
| AD-1526948.1 | 54.03 | 12.86 | 49.36 | 11.49 | 89.39 | 20.70 |
| AD-1527057.1 | 45.64 | 3.49 | 42.30 | 5.15 | 40.75 | 6.88 |
| AD-1526949.1 | 51.99 | 11.22 | 40.56 | 8.10 | 49.31 | 4.91 |
| AD-1526951.1 | 54.73 | 8.57 | 59.20 | 5.49 | 68.17 | 7.03 |
| AD-1526950.1 | 57.95 | 9.53 | 60.74 | 3.30 | 69.44 | 15.48 |
| AD-1526952.1 | 84.19 | 11.11 | 87.85 | 10.91 | 89.44 | 11.86 |
| AD-1527058.1 | 57.03 | 3.64 | 52.85 | 6.86 | 39.49 | 1.95 |
| AD-1526953.1 | 60.26 | 10.37 | 63.72 | 10.60 | 49.16 | 2.48 |
| AD-1526954.1 | 58.97 | 10.67 | 63.12 | 10.57 | 60.61 | 6.41 |
| AD-1527059.1 | 57.41 | 5.33 | 56.29 | 7.23 | 59.58 | 6.94 |
| AD-1527060.1 | 67.72 | 6.72 | 89.94 | 16.03 | 64.39 | 9.96 |
| AD-1526955.1 | 46.62 | 8.31 | 55.52 | 9.83 | 56.07 | 12.27 |
| AD-1526956.1 | 48.87 | 8.78 | 50.68 | 3.66 | 63.65 | 14.00 |
| AD-1526957.1 | 67.75 | 14.60 | 51.66 | 11.36 | 58.76 | 20.73 |
| AD-1526958.1 | 66.82 | 17.50 | 61.92 | 13.39 | 87.99 | 19.94 |
| AD-1526959.1 | 41.06 | 9.43 | 38.80 | 5.06 | 69.93 | 6.79 |
| AD-1527061.1 | 50.79 | 11.11 | 43.10 | 8.65 | 30.91 | 6.40 |
| AD-1526960.1 | 32.47 | 6.27 | 22.15 | 1.43 | 34.88 | 11.42 |
| AD-1526961.1 | 35.95 | 9.75 | 36.11 | 2.97 | 54.29 | 12.43 |
| AD-1526962.1 | 37.80 | 7.74 | 32.77 | 4.02 | 45.45 | 8.13 |
| AD-1526963.1 | 41.80 | 10.46 | 39.64 | 4.04 | 54.54 | 8.94 |
| AD-1526964.1 | 39.46 | 5.23 | 42.84 | 13.61 | 52.08 | 11.81 |
| AD-1526965.1 | 38.58 | 9.77 | 33.55 | 3.81 | 38.36 | 6.62 |
| AD-1193373.2 | 89.19 | 21.04 | 66.76 | 12.05 | 72.78 | 21.98 |
| AD-1527101.1 | 44.99 | 8.54 | 57.13 | 10.30 | 49.59 | 4.03 |
| AD-1526967.1 | 47.27 | 9.85 | 46.91 | 12.02 | 74.04 | 9.89 |
| AD-1526968.1 | 32.95 | 7.59 | 26.37 | 1.91 | 42.38 | 6.71 |
| AD-1526969.1 | 31.53 | 12.80 | 37.27 | 6.68 | 37.52 | 12.94 |
| AD-1526970.1 | 35.09 | 8.30 | 33.71 | 6.51 | 36.25 | 7.40 |
| AD-1526971.1 | 45.31 | 8.62 | 35.84 | 7.93 | 39.24 | 14.20 |
| AD-1526972.1 | 37.10 | 11.11 | 44.39 | 2.32 | 55.77 | 15.11 |
| AD-1527102.1 | 53.14 | 12.38 | 47.35 | 6.08 | 42.83 | 10.78 |
| AD-1526973.1 | 54.82 | 9.90 | 34.62 | 2.67 | 55.39 | 6.85 |
| AD-1526974.1 | 47.57 | 11.14 | 41.72 | 8.02 | 58.37 | 3.14 |
| AD-1526975.1 | 33.52 | 6.25 | 32.89 | 5.89 | 41.68 | 7.36 |
| AD-1526976.1 | 36.03 | 7.29 | 29.55 | 6.75 | 48.13 | 9.07 |
| AD-1527103.1 | 40.60 | 11.16 | 48.63 | 3.16 | 41.59 | 4.62 |
| AD-1527104.1 | 34.77 | 3.61 | 49.84 | 8.70 | 38.08 | 5.74 |
| AD-1526977.1 | 38.77 | 11.91 | 15.64 | 5.26 | 36.41 | 4.25 |
| AD-1527105.1 | 54.73 | 9.93 | 63.20 | 16.32 | 50.10 | 8.59 |
| AD-1526978.1 | 40.62 | 4.73 | 31.13 | 8.73 | 68.53 | 9.26 |
| AD-1526979.1 | 46.09 | 11.74 | 43.69 | 6.02 | 52.84 | 14.23 |
| AD-1527089.1 | 41.69 | 12.83 | 42.73 | 10.61 | 46.65 | 11.68 |
| AD-1526981.1 | 59.45 | 13.82 | 57.97 | 14.58 | 75.33 | 22.34 |
| AD-1526982.1 | 53.35 | 8.99 | 55.46 | 11.28 | 74.26 | 14.68 |
| AD-1526983.1 | 52.50 | 9.57 | 51.42 | 5.46 | 65.63 | 6.73 |
| AD-1527067.1 | 60.09 | 10.31 | 78.29 | 17.04 | 59.06 | 15.18 |
| AD-1527068.1 | 35.32 | 4.98 | 44.61 | 4.50 | 41.89 | 4.73 |
| AD-1526984.1 | 33.17 | 13.09 | 32.36 | 7.06 | 39.77 | 9.97 |
| AD-1526985.1 | 35.56 | 7.24 | 34.94 | 8.94 | 41.34 | 5.80 |
| AD-1526986.1 | 54.14 | 10.17 | 43.25 | 10.42 | 63.80 | 7.67 |
| AD-1527106.1 | 39.12 | 7.50 | 27.63 | 5.38 | 30.69 | 7.50 |
| AD-1526987.1 | 25.56 | 7.50 | 18.83 | 5.39 | 35.02 | 4.42 |
| AD-1526988.1 | 29.28 | 11.96 | 34.27 | 3.50 | 43.94 | 6.92 |
| AD-1526989.1 | 21.41 | 6.72 | 27.94 | 9.08 | 34.06 | 4.64 |
| AD-1527107.1 | 34.64 | 7.59 | 63.09 | 11.66 | 38.35 | 8.35 |
| AD-1526990.1 | 20.26 | 6.19 | 16.02 | 2.88 | 28.64 | 8.79 |
| AD-1526991.1 | 33.64 | 6.99 | 26.83 | 2.59 | 38.10 | 1.71 |
| AD-1526992.1 | 39.73 | 10.60 | 36.00 | 7.96 | 45.37 | 7.03 |
| AD-1526993.1 | 25.92 | 7.77 | 19.59 | 1.02 | 31.89 | 7.04 |
| AD-1526994.1 | 31.17 | 7.10 | 41.45 | 4.94 | 35.73 | 3.39 |
| AD-1526995.1 | 39.67 | 14.04 | 46.65 | 7.29 | 67.92 | 14.43 |
| AD-1526996.1 | 41.58 | 3.43 | 57.50 | 3.08 | 48.20 | 8.40 |
| AD-1526997.1 | 33.93 | 4.15 | 37.24 | 5.95 | 29.48 | 11.56 |
| AD-1526999.1 | 24.56 | 4.55 | 37.31 | 4.43 | 36.13 | 2.97 |
| AD-1526998.1 | 26.84 | 9.47 | 29.85 | 2.30 | 32.13 | 5.10 |
| AD-1527000.1 | 30.27 | 8.27 | 32.00 | 8.16 | 35.84 | 11.10 |
| AD-1527001.1 | 31.81 | 11.14 | 24.59 | 3.17 | 36.79 | 14.10 |
| AD-1527002.1 | 30.46 | 11.56 | 24.48 | 4.62 | 37.85 | 14.87 |
| AD-1527003.1 | N/A | N/A | 24.45 | 0.48 | 38.07 | 26.00 |
| AD-1527108.1 | 38.59 | 5.45 | 39.66 | 13.53 | 39.49 | 5.84 |
| AD-1527004.1 | 29.19 | 5.32 | 33.51 | 11.06 | 38.67 | 11.48 |
| AD-1527005.1 | 30.69 | 3.17 | 35.60 | 10.58 | 45.66 | 5.78 |

### Example 3. Additional Duplexes Targeting PNPLA3

[0698] Additional duplexes targeting human PNPLA3 gene were designed using custom R and Python scripts and synthesized as described above.

[0699] Detailed lists of the unmodified PNPLA3 sense and antisense strand nucleotide sequences are shown in Table 6. Detailed lists of the modified PNPLA3 sense and antisense strand nucleotide sequences are shown in Table 7.

[0700] Single dose screens of the additional agents are performed by free uptake and transfection as described above.

TABLE 6
Unmodifed Sense and Antisense Strand Sequences of PNPLA3 dsRNA Agents

| | | SEQ | | | SEQ | |
|---|---|---|---|---|---|---|
| Duplex | | ID | Range in | | ID | Range in |
| Name | Sense Sequence 5′ to 3′ | NO: | NM_025225.2 | Antisense Sequence 5′-3′ | NO: | NM_025225.2 |
| AD- | AUUAGGAUAAUGUCUUAUGUA | 1463 | 1215-1235 | UACAUAAGACAUUAUCCUAAUGG | 1500 | 1213-1235 |
| 1010714.3 | | | | | | |
| AD- | GCUGAGUUGGUUUUAUGAAAA | 1464 | 1745-1765 | UUUUCAUAAAACCAACUCAGCUC | 1501 | 1743-1765 |
| 1010719.3 | | | | | | |
| AD- | CACCUUUUUCACCUAACUAAA | 1465 | 2179-2199 | UUUAGUUAGGUGAAAAAGGUGUU | 1502 | 2177-2199 |
| 1010732.4 | | | | | | |
| AD- | UUUUUCACCUAACUAAAAUAA | 1466 | 2183-2203 | UUAUUUUAGUUAGGUGAAAAAGG | 1503 | 2181-2203 |
| 1010734.3 | | | | | | |
| AD- | ACCUAACUAAAAUAAUGUUUA | 1467 | 2189-2209 | UAAACAUUAUUUUAGUUAGGUGA | 1504 | 2187-2209 |
| 1010735.4 | | | | | | |
| AD- | GGGGUAACAAGAUGAUAAUCU | 1468 | 2144-2164 | AGAUUAUCAUCUUGUUACCCCCG | 1505 | 2142-2164 |
| 1531673.2 | | | | | | |
| AD- | CUCCAUGGCGGGGGUAACAAA | 1469 | 2134-2154 | UUUGUUACCCCCGCCAUGGAGAC | 1506 | 2132-2154 |
| 1531674.2 | | | | | | |
| AD- | UAGGAUAAUGUCUUAUGUAAU | 1470 | 1217-1237 | ATUACATAAGACAUUAUCCUAAU | 1507 | 1215-1237 |
| 1636724.1 | | | | | | |
| AD- | CCUAACUAAAAUAAUGUUUAA | 1471 | 2190-2210 | UTAAACAUUAUTUUAGUUAGGUG | 1508 | 2188-2210 |
| 1636725.1 | | | | | | |
| AD- | AUGUUAGUAGAAUAAGCCUUA | 1472 | 2279-2299 | UAAGGCTUAUUCUACUAACAUCU | 1509 | 2277-2299 |
| 1636726.1 | | | | | | |
| AD- | CACCUUUUUCACCUAACUAAA | 1465 | 2179-2199 | UTUAGUTAGGUGAAAAAGGUGUU | 1510 | 2177-2199 |
| 1636727.1 | | | | | | |
| AD- | UGAGUGAAGAAAUGAAAGACA | 1473 | 1156-1176 | UGUCTUTCAUUTCUUCACUCAGU | 1511 | 1154-1176 |
| 1636728.1 | | | | | | |
| AD- | ACCUAACUAAAAUAAUGUUUA | 1467 | 2189-2209 | UAAACATUAUUTUAGUUAGGUGA | 1512 | 2187-2209 |
| 1636729.1 | | | | | | |
| AD- | UUUUUCACCUAACUAAAAUAA | 1466 | 2183-2203 | UTAUTUTAGUUAGGUGAAAAAGG | 1513 | 2181-2203 |
| 1636730.1 | | | | | | |
| AD- | GAUUUGCAACUUGCUACCCAU | 1474 | 1196-1216 | ATGGGUAGCAAGUUGCAAAUCUU | 1514 | 1194-1216 |
| 1636731.1 | | | | | | |
| AD- | AUAAUGUCUUAUGUAAUGCUU | 1475 | 1221-1241 | AAGCAUTACAUAAGACAUUAUCC | 1515 | 1219-1241 |
| 1636732.1 | | | | | | |
| AD- | AACUUGCUACCCAUUAGGAUA | 1476 | 1203-1223 | UAUCCUAAUGGGUAGCAAGUUGC | 1516 | 1201-1223 |
| 1636733.1 | | | | | | |
| AD- | CUGAGUUGGUUUUAUGAAAAU | 208 | 1746-1766 | ATUUTCAUAAAACCAACUCAGCU | 1517 | 1744-1766 |
| 1636734.1 | | | | | | |
| AD- | ACCUGUUGAAUUUUGUAUUAU | 242 | 2245-2265 | ATAATACAAAATUCAACAGGUAA | 1518 | 2243-2265 |
| 1636735.1 | | | | | | |
| AD- | UUUUAGAACACCUUUUUCACU | 1477 | 2171-2191 | AGUGAAAAAGGTGUUCUAAAAUU | 1519 | 2169-2191 |
| 1636736.1 | | | | | | |
| AD- | AUACAUGAGCAAGAUUUGCAA | 1478 | 1184-1204 | UTGCAAAUCUUGCUCAUGUAUCC | 1520 | 1182-1204 |
| 1636737.1 | | | | | | |
| AD- | UCUGAGCUGAGUUGGUUUUAU | 202 | 1740-1760 | ATAAAACCAACTCAGCUCAGAGG | 1521 | 1738-1760 |
| 1636738.1 | | | | | | |
| AD- | GCUGAGUUGGUUUUAUGAAAA | 1464 | 1745-1765 | UTUUCATAAAACCAACUCAGCUC | 1522 | 1743-1765 |
| 1636739.1 | | | | | | |
| AD- | GGCCUUAUCCCUCCUUCCUUA | 1479 | 630-650 | UAAGGAAGGAGGGAUAAGGCCAC | 1523 | 628-650 |
| 1636740.1 | | | | | | |
| AD- | CACCUUUUUCACCUAACUAAU | 227 | 2179-2199 | ATUAGUTAGGUGAAAAAGGUGUU | 1524 | 2177-2199 |
| 1636741.1 | | | | | | |
| AD- | UGGAUACAUGAGCAAGAUUUA | 1480 | 1181-1201 | UAAATCTUGCUCAUGUAUCCACC | 1525 | 1179-1201 |
| 1636742.1 | | | | | | |
| AD- | CUAUUAAUGGUCAGACUGUUA | 1481 | 1901-1921 | UAACAGTCUGACCAUUAAUAGGG | 1526 | 1899-1921 |
| 1636743.1 | | | | | | |
| AD- | GCACAGGGAACCUCUACCUUA | 1482 | 817-837 | UAAGGUAGAGGTUCCCUGUGCAG | 1527 | 815-837 |
| 1636744.1 | | | | | | |
| AD- | UUAUGUAAUGCUGCCCUGUAA | 1483 | 1229-1249 | UTACAGGGCAGCAUUACAUAAGA | 1528 | 1227-1249 |
| 1636745.1 | | | | | | |
| AD- | GUGAGUGACAACGUACCCUUA | 1484 | 678-698 | UAAGGGTACGUTGUCACUCACUC | 1529 | 676-698 |
| 1636746.1 | | | | | | |
| AD- | GUGCUAAAGUUUCCCAUCUUU | 1485 | 1658-1678 | AAAGAUGGGAAACUUUAGCACCU | 1530 | 1656-1678 |
| 1636747.1 | | | | | | |
| AD- | UACCUGUUGAAUUUUGUAUUA | 1486 | 2244-2264 | UAAUACAAAAUTCAACAGGUAAC | 1531 | 2242-2264 |
| 1636748.1 | | | | | | |
| AD- | GGGGUAACAAGAUGAUAAUCU | 1468 | 2144-2164 | AGAUTATCAUCTUGUUACCCCCG | 1532 | 2142-2164 |
| 1636749.1 | | | | | | |
| AD- | CGACAUCUGCCCUAAAGUCAA | 1487 | 746-766 | UTGACUTUAGGGCAGAUGUCGUA | 1533 | 744-766 |
| 1636750.1 | | | | | | |
| AD- | UGGUGACAUGGCUUCCAGAUA | 1488 | 1288-1308 | UAUCTGGAAGCCAUGUCACCAGU | 1534 | 1286-1308 |
| 1636751.1 | | | | | | |
| AD- | UUGCUACCCAUUAGGAUAAUA | 1489 | 1206-1226 | UAUUAUCCUAATGGGUAGCAAGU | 1535 | 1204-1226 |
| 1636752.1 | | | | | | |
| AD- | CAUGAGCAAGAUUUGCAACUU | 272 | 1187-1207 | AAGUTGCAAAUCUUGCUCAUGUA | 562 | 1185-1207 |
| 1636753.1 | | | | | | |
| AD- | AAAUGAAAGACAAAGGUGGAU | 1490 | 1165-1185 | ATCCACCUUUGTCUUUCAUUUCU | 1536 | 1163-1185 |
| 1636754.1 | | | | | | |
| AD- | UGGGAGAGAUAUGCCUUCGAA | 1491 | 874-894 | UTCGAAGGCAUAUCUCUCCCAGC | 1537 | 872-894 |
| 1636755.1 | | | | | | |
| AD- | CUCCAUGGCGGGGGUAACAAA | 1469 | 2134-2154 | UTUGTUACCCCCGCCAUGGAGAC | 1538 | 2132-2154 |
| 1636756.1 | | | | | | |
| AD- | AGCAUGAGGUUCUUAGAAUGU | 1492 | 1923-1943 | ACAUTCTAAGAACCUCAUGCUGG | 1539 | 1921-1943 |
| 1636757.1 | | | | | | |
| AD- | AGGAAGCAACCUUUCGCCUGU | 1493 | 1769-1789 | ACAGGCGAAAGGUUGCUUCCUAG | 1540 | 1767-1789 |
| 1636758.1 | | | | | | |
| AD- | UUGGUUUUAUGAAAAGCUAGA | 1494 | 1751-1771 | UCUAGCTUUUCAUAAAACCAACU | 1541 | 1749-1771 |
| 1636759.1 | | | | | | |
| AD- | AUUAGGAUAAUGUCUUAUGUA | 1463 | 1215-1235 | UACATAAGACATUAUCCUAAUGG | 1542 | 1213-1235 |
| 1636760.1 | | | | | | |
| AD- | UCACUUGAGGAGGCGAGUCUA | 1495 | 1621-1641 | UAGACUCGCCUCCUCAAGUGACU | 1543 | 1619-1641 |
| 1636761.1 | | | | | | |
| AD- | CAAGAUUUGCAACUUGCUACA | 1496 | 1193-1213 | UGUAGCAAGUUGCAAAUCUUGCU | 1544 | 1191-1213 |
| 1636762.1 | | | | | | |
| AD- | UGCCAAAACAACCAUCACCGU | 1497 | 704-724 | ACGGTGAUGGUTGUUUUGGCAUC | 1545 | 702-724 |
| 1636764.1 | | | | | | |
| AD- | CCAUUAGGAUAAUGUCUUAUU | 1498 | 1213-1233 | AAUAAGACAUUAUCCUAAUGGGU | 1546 | 1211-1233 |
| 1636765.1 | | | | | | |
| AD- | UUACCUGUUGAAUUUUGUAUU | 1499 | 2243-2263 | AAUACAAAAUUCAACAGGUAACA | 1547 | 2241-2263 |
| 1636768.1 | | | | | | |
| AD- | UGCCAAAACAACCAUCACCGU | 1497 | 704-724 | ACGGUGAUGGUUGUUUUGGCAUC | 1548 | 702-724 |
| 518942.2 | | | | | | |
| AD- | UGCCAAAACAACCAUCACCGU | 1497 | 704-724 | ACGGUGAUGGUUGUUUUGGCAUC | 1548 | 702-724 |
| 518942.3 | | | | | | |
| AD- | UGCCAAAACAACCAUCACCGU | 1497 | 704-724 | ACGGUGAUGGUUGUUUUGGCAUC | 1548 | 702-724 |
| 518942.4 | | | | | | |
| AD- | CCAUUAGGAUAAUGUCUUAUU | 1498 | 1213-1233 | AAUAAGACAUUAUCCUAAUGGGU | 1546 | 1211-1233 |
| 519346.5 | | | | | | |
| AD- | CCAUUAGGAUAAUGUCUUAUU | 1498 | 1213-1233 | AAUAAGACAUUAUCCUAAUGGGU | 1546 | 1211-1233 |
| 519346.6 | | | | | | |
| AD- | CCAUUAGGAUAAUGUCUUAUU | 1498 | 1213-1233 | AAUAAGACAUUAUCCUAAUGGGU | 1546 | 1211-1233 |
| 519346.7 | | | | | | |
| AD- | UAGGAUAAUGUCUUAUGUAAU | 1470 | 1217-1237 | AUUACAUAAGACAUUAUCCUAAU | 1549 | 1215-1237 |
| 519350.6 | | | | | | |
| AD- | AUAAUGUCUUAUGUAAUGCUU | 1475 | 1221-1241 | AAGCAUUACAUAAGACAUUAUCC | 1550 | 1219-1241 |
| 519354.4 | | | | | | |
| AD- | CUGAGUUGGUUUUAUGAAAAU | 208 | 1746-1766 | AUUUUCAUAAAACCAACUCAGCU | 1551 | 1744-1766 |
| 519757.6 | | | | | | |
| AD- | AGGAAGCAACCUUUCGCCUGU | 1493 | 1769-1789 | ACAGGCGAAAGGUUGCUUCCUAG | 1540 | 1767-1789 |
| 519780.2 | | | | | | |
| AD- | AGCAUGAGGUUCUUAGAAUGU | 1492 | 1923-1943 | ACAUUCUAAGAACCUCAUGCUGG | 1552 | 1921-1943 |
| 519933.3 | | | | | | |
| AD- | UUUUAGAACACCUUUUUCACU | 1477 | 2171-2191 | AGUGAAAAAGGUGUUCUAAAAUU | 1553 | 2169-2191 |
| 520053.7 | | | | | | |
| AD- | CACCUUUUUCACCUAACUAAU | 227 | 2179-2199 | AUUAGUUAGGUGAAAAAGGUGUU | 1554 | 2177-2199 |
| 520061.6 | | | | | | |
| AD-67526.5 | GGCCUUAUCCCUCCUUCCUUA | 1479 | 630-650 | UAAGGAAGGAGGGAUAAGGCCAC | 1523 | 628-650 |
| AD-67551.7 | AUACAUGAGCAAGAUUUGCAA | 1478 | 1184-1204 | UUGCAAAUCUUGCUCAUGUAUCC | 1555 | 1182-1204 |
| AD- | UCUGAGCUGAGUUGGUUUUAU | 202 | 1740-1760 | AUAAAACCAACUCAGCUCAGAGG | 490 | 1738-1760 |
| 67554.11 | | | | | | |
| AD-67560.7 | CUAUUAAUGGUCAGACUGUUA | 1481 | 1901-1921 | UAACAGUCUGACCAUUAAUAGGG | 1556 | 1899-1921 |
| AD-67561.3 | UGGAUACAUGAGCAAGAUUUA | 1480 | 1181-1201 | UAAAUCUUGCUCAUGUAUCCACC | 1557 | 1179-1201 |
| AD-67564.3 | UCACUUGAGGAGGCGAGUCUA | 1495 | 1621-1641 | UAGACUCGCCUCCUCAAGUGACU | 1543 | 1619-1641 |
| AD-67565.3 | AUGUUAGUAGAAUAAGCCUUA | 1472 | 2279-2299 | UAAGGCUUAUUCUACUAACAUCU | 1558 | 2277-2299 |
| AD-67567.3 | UUGGUUUUAUGAAAAGCUAGA | 1494 | 1751-1771 | UCUAGCUUUUCAUAAAACCAACU | 1559 | 1749-1771 |
| AD-67568.3 | GCACAGGGAACCUCUACCUUA | 1482 | 817-837 | UAAGGUAGAGGUUCCCUGUGCAG | 1560 | 815-837 |
| AD-67573.3 | UGGUGACAUGGCUUCCAGAUA | 1488 | 1288-1308 | UAUCUGGAAGCCAUGUCACCAGU | 1561 | 1286-1308 |
| AD- | UUACCUGUUGAAUUUUGUAUU | 1499 | 2243-2263 | AAUACAAAAUUCAACAGGUAACA | 1547 | 2241-2263 |
| 67575.11 | | | | | | |
| AD- | UUACCUGUUGAAUUUUGUAUU | 1499 | 2243-2263 | AAUACAAAAUUCAACAGGUAACA | 1547 | 2241-2263 |
| 67575.12 | | | | | | |
| AD- | UUACCUGUUGAAUUUUGUAUU | 1499 | 2243-2263 | AAUACAAAAUUCAACAGGUAACA | 1547 | 2241-2263 |
| 67575.13 | | | | | | |
| AD-67577.7 | CGACAUCUGCCCUAAAGUCAA | 1487 | 746-766 | UUGACUUUAGGGCAGAUGUCGUA | 1562 | 744-766 |
| AD-67578.3 | GUGAGUGACAACGUACCCUUA | 1484 | 678-698 | UAAGGGUACGUUGUCACUCACUC | 1563 | 676-698 |
| AD-67582.6 | GUGCUAAAGUUUCCCAUCUUU | 1485 | 1658-1678 | AAAGAUGGGAAACUUUAGCACCU | 1530 | 1656-1678 |
| AD-67583.7 | CAAGAUUUGCAACUUGCUACA | 1496 | 1193-1213 | UGUAGCAAGUUGCAAAUCUUGCU | 1544 | 1191-1213 |
| AD-67584.8 | CCUAACUAAAAUAAUGUUUAA | 1471 | 2190-2210 | UUAAACAUUAUUUUAGUUAGGUG | 1564 | 2188-2210 |
| AD-67586.3 | UGGGAGAGAUAUGCCUUCGAA | 1491 | 874-894 | UUCGAAGGCAUAUCUCUCCCAGC | 1565 | 872-894 |
| AD-67589.6 | AACUUGCUACCCAUUAGGAUA | 1476 | 1203-1223 | UAUCCUAAUGGGUAGCAAGUUGC | 1516 | 1201-1223 |
| AD- | ACCUGUUGAAUUUUGUAUUAU | 242 | 2245-2265 | AUAAUACAAAAUUCAACAGGUAA | 532 | 2243-2265 |
| 67605.10 | | | | | | |
| AD-75247.4 | AAAUGAAAGACAAAGGUGGAU | 1490 | 1165-1185 | AUCCACCUUUGUCUUUCAUUUCU | 1566 | 1163-1185 |
| AD-75265.5 | CAUGAGCAAGAUUUGCAACUU | 272 | 1187-1207 | AAGUUGCAAAUCUUGCUCAUGUA | 1567 | 1185-1207 |
| AD-75269.3 | UGAGUGAAGAAAUGAAAGACA | 1473 | 1156-1176 | UGUCUUUCAUUUCUUCACUCAGU | 1568 | 1154-1176 |
| AD-75270.4 | UACCUGUUGAAUUUUGUAUUA | 1486 | 2244-2264 | UAAUACAAAAUUCAACAGGUAAC | 1569 | 2242-2264 |
| AD-75272.3 | UUGCUACCCAUUAGGAUAAUA | 1489 | 1206-1226 | UAUUAUCCUAAUGGGUAGCAAGU | 1570 | 1204-1226 |
| AD-75274.6 | UUAUGUAAUGCUGCCCUGUAA | 1483 | 1229-1249 | UUACAGGGCAGCAUUACAUAAGA | 1571 | 1227-1249 |
| AD-75275.3 | GAUUUGCAACUUGCUACCCAU | 1474 | 1196-1216 | AUGGGUAGCAAGUUGCAAAUCUU | 1572 | 1194-1216 |

TABLE 7
Modifed Sense and Antisense Strand Sequences of PNPLA3 dsRNA Agents

| Duplex Name | Sense Sequence 5′ to 3′ | SEQ ID NO: | Antisense Sequence 5′ to 3′ | SEQ ID NO: | mRNA Target Sequence | SEQ ID NO: |
|---|---|---|---|---|---|---|
| AD-1010714.3 | asusuaggAfuAfAfUfgucuuauguaL96 | 1573 | usAfscauAfaGfAfcauuAfuCfcuaausgsg | 1652 | CCAUUAGGAUAAUGUCUUAUGUA | 1736 |
| AD-1010719.3 | gscsugagUfuGfGfUfuuuaugaaaaL96 | 1574 | usUfsuucAfuAfAfaaccAfaCfucagesusc | 1653 | GAGCUGAGUUGGUUUUAUGAAAA | 1369 |
| AD-1010732.4 | csasccuuUfuUfCfAfccuaacuaaaL96 | 1575 | usUfsuagUfuAfGfgugaAfaAfaggugsusu | 1654 | AACACCUUUUUCACCUAACUAAA | 1389 |
| AD-1010734.3 | ususuuucAfcCfUfAfacuaaaauaaL96 | 1576 | usUfsauuUfuAfGfuuagGfuGfaaaaasgsg | 1655 | CCUUUUUCACCUAACUAAAAUAA | 1392 |
| AD-1010735.4 | ascscuaaCfuAfAfAfauaauguuuaL96 | 1577 | usAfsaacAfuUfAfuuuuAfgUfuaggusgsa | 1656 | UCACCUAACUAAAAUAAUGUUUA | 1398 |
| AD-1531673.2 | gsgsgguaAfcAfAfGfaugauaaucuL96 | 1578 | asGfsauuAfuCfAfucuuGfuUfaccccscsg | 1657 | CGGGGGUAACAAGAUGAUAAUCU | 1737 |
| AD-1531674.2 | csusccauGfgCfGfGfggguaacaaaL96 | 1579 | usUfsuguUfaCfCfcccgCfcAfuggagsasc | 1658 | GUCUCCAUGGCGGGGGUAACAAG | 1738 |
| AD-1636724.1 | usasggauaaUfGfUfcuuauguaauL96 | 1580 | asdTsuadCadTaagadCaUfuauccuasasu | 1659 | AUUAGGAUAAUGUCUUAUGUAAU | 1739 |
| AD-1636725.1 | cscsuaacuaAfAfAfuaauguuuaaL96 | 1581 | usdTsaadAcdAuuaudTuUfaguuaggsusg | 1660 | CACCUAACUAAAAUAAUGUUUAA | 1399 |
| AD-1636726.1 | asusguuaguAfGfAfauaagccuuaL96 | 1582 | usdAsagdGcdTuauudCuAfcuaacauscsu | 1661 | AGAUGUUAGUAGAAUAAGCCUUA | 1740 |
| AD-1636727.1 | csasccuuuuUfCfAfccuaacuaaaL96 | 1583 | usdTsuadGudTaggudGaAfaaaggugsusu | 1662 | AACACCUUUUUCACCUAACUAAA | 1389 |
| AD-1636728.1 | usgsagugaaGfAfAfaugaaagacaL96 | 1584 | usdGsucdTudTcauudTcUfucacucasgsu | 1663 | ACUGAGUGAAGAAAUGAAAGACA | 1741 |
| AD-1636729.1 | ascscuaacuAfAfAfauaauguuuaL96 | 1585 | usdAsaadCadTuauudTuAfguuaggusgsa | 1664 | UCACCUAACUAAAAUAAUGUUUA | 1398 |
| AD-1636730.1 | ususuuucacCfUfAfacuaaaauaaL96 | 1586 | usdTsaudTudTaguudAgGfugaaaaasgsg | 1665 | CCUUUUUCACCUAACUAAAAUAA | 1392 |
| AD-1636731.1 | gsasuuugcaAfCfUfugcuacccauL96 | 1587 | asdTsggdGudAgcaadGuUfgcaaaucsusu | 1666 | AAGAUUUGCAACUUGCUACCCAU | 1742 |
| AD-1636732.1 | asusaaugucUfUfAfuguaaugcuuL96 | 1588 | asdAsgcdAudTacaudAaGfacauuauscsc | 1667 | GGAUAAUGUCUUAUGUAAUGCUG | 1743 |
| AD-1636733.1 | asascuugcuAfCfCfcauuaggauaL96 | 1589 | usdAsucdCudAauggdGuAfgcaaguusgsc | 1668 | GCAACUUGCUACCCAUUAGGAUA | 1313 |
| AD-1636734.1 | csusgaguugGfUfUfuuaugaaaauL96 | 1590 | asdTsuudTedAuaaadAcCfaacucagscsu | 1669 | AGCUGAGUUGGUUUUAUGAAAAG | 1370 |
| AD-1636735.1 | ascscuguugAfAfUfuuuguauuauL96 | 1591 | asdTsaadTadCaaaadTuCfaacaggusasa | 1670 | UUACCUGUUGAAUUUUGUAUUAU | 1404 |
| AD-1636736.1 | ususuuagaaCfAfCfcuuuuucacuL96 | 1592 | asdGsugdAadAaaggdTgUfucuaaaasusu | 1671 | AAUUUUAGAACACCUUUUUCACC | 1744 |
| AD-1636737.1 | asusacaugaGfCfAfagauuugcaaL96 | 1593 | usdTsgcdAadAucuudGcUfcauguauscsc | 1672 | GGAUACAUGAGCAAGAUUUGCAA | 1303 |
| AD-1636738.1 | uscsugagcuGfAfGfuugguuuuauL96 | 1594 | asdTsaadAadCcaacdTcAfgcucagasgsg | 1673 | CCUCUGAGCUGAGUUGGUUUUAU | 1364 |
| AD-1636739.1 | gscsugaguuGfGfUfuuuaugaaaaL96 | 1595 | usdTsuudCadTaaaadCcAfacucagcsusc | 1674 | GAGCUGAGUUGGUUUUAUGAAAA | 1369 |
| AD-1636740.1 | gsgsccuuauCfCfCfuccuuccuuaL96 | 1596 | usdAsagdGadAggagdGgAfuaaggccsasc | 1675 | GUGGCCUUAUCCCUCCUUCCUUC | 1745 |
| AD-1636741.1 | csasccuuuuUfCfAfccuaacuaauL96 | 1597 | asdTsuadGudTaggudGaAfaaaggugsusu | 1676 | AACACCUUUUUCACCUAACUAAA | 1389 |
| AD-1636742.1 | usgsgauacaUfGfAfgcaagauuuaL96 | 1598 | usdAsaadTedTugcudCaUfguauccascsc | 1677 | GGUGGAUACAUGAGCAAGAUUUG | 1746 |
| AD-1636743.1 | csusauuaauGfGfUfcagacuguuaL96 | 1599 | usdAsacdAgdTcugadCcAfuuaauagsgsg | 1678 | CCCUAUUAAUGGUCAGACUGUUC | 1747 |
| AD-1636744.1 | gscsacagggAfAfCfcucuaccuuaL96 | 1600 | usdAsagdGudAgaggdTuCfccugugcsasg | 1679 | CUGCACAGGGAACCUCUACCUUC | 1250 |
| AD-1636745.1 | ususauguaaUfGfCfugcccuguaaL96 | 1601 | usdTsacdAgdGgcagdCaUfuacauaasgsa | 1680 | UCUUAUGUAAUGCUGCCCUGUAC | 1748 |
| AD-1636746.1 | gsusgagugaCfAfAfcguacccuuaL96 | 1602 | usdAsagdGgdTacgudTgUfcacucacsusc | 1681 | GAGUGAGUGACAACGUACCCUUC | 1229 |
| AD-1636747.1 | gsusgcuaaaGfUfUfucccaucuuuL96 | 1603 | asdAsagdAudGggaadAcUfuuagcacscsu | 1682 | AGGUGCUAAAGUUUCCCAUCUUU | 1749 |
| AD-1636748.1 | usasccuguuGfAfAfuuuuguauuaL96 | 1604 | usdAsaudAcdAaaaudTcAfacagguasasc | 1683 | GUUACCUGUUGAAUUUUGUAUUA | 1750 |
| AD-1636749.1 | gsgsgguaacAfAfGfaugauaaucuL96 | 1605 | asdGsaudTadTcaucdTuGfuuaccccscsg | 1684 | CGGGGGUAACAAGAUGAUAAUCU | 1737 |
| AD-1636750.1 | csgsacaucuGfCfCfcuaaagucaaL96 | 1606 | usdTsgadCudTuaggdGcAfgaugucgsusa | 1685 | UACGACAUCUGCCCUAAAGUCAA | 1240 |
| AD-1636751.1 | usgsgugacaUfGfGfcuuccagauaL96 | 1607 | usdAsucdTgdGaagcdCaUfgucaccasgsu | 1686 | ACUGGUGACAUGGCUUCCAGAUA | 1443 |
| AD-1636752.1 | ususgcuaccCfAfUfuaggauaauaL96 | 1608 | usdAsuudAudCcuaadTgGfguagcaasgsu | 1687 | ACUUGCUACCCAUUAGGAUAAUG | 1751 |
| AD-1636753.1 | csasugagcaAfGfAfuuugcaacuuL96 | 1609 | asdAsgudTgdCaaaudCuUfgcucaugsusa | 1688 | UACAUGAGCAAGAUUUGCAACUU | 1434 |
| AD-1636754.1 | asasaugaaaGfAfCfaaagguggauL96 | 1610 | asdTsccdAcdCuuugdTcUfuucauuuscsu | 1689 | AGAAAUGAAAGACAAAGGUGGAU | 1752 |
| AD-1636755.1 | usgsggagagAfUfAfugccuucgaaL96 | 1611 | usdTscgdAadGgcaudAuCfucucccasgsc | 1690 | GCUGGGAGAGAUAUGCCUUCGAG | 1261 |
| AD-1636756.1 | csusccauggCfGfGfggguaacaaaL96 | 1612 | usdTsugdTudAccccdCgCfcauggagsasc | 1691 | GUCUCCAUGGCGGGGGUAACAAG | 1738 |
| AD-1636757.1 | asgscaugagGfUfUfcuuagaauguL96 | 1613 | asdCsaudTcdTaagadAcCfucaugcusgsg | 1692 | CCAGCAUGAGGUUCUUAGAAUGA | 1753 |
| AD-1636758.1 | asgsgaagcaAfCfCfuuucgccuguL96 | 1614 | asdCsagdGcdGaaagdGuUfgcuuccusasg | 1693 | CUAGGAAGCAACCUUUCGCCUGU | 1754 |
| AD-1636759.1 | ususgguuuuAfUfGfaaaagcuagaL96 | 1615 | usdCsuadGcdTuuucdAuAfaaaccaascsu | 1694 | AGUUGGUUUUAUGAAAAGCUAGG | 1374 |
| AD-1636760.1 | asusuaggauAfAfUfgucuuauguaL96 | 1616 | usdAscadTadAgacadTuAfuccuaausgsg | 1695 | CCAUUAGGAUAAUGUCUUAUGUA | 1736 |
| AD-1636761.1 | uscsacuugaGfGfAfggcgagucuaL96 | 1617 | usdAsgadCudCgccudCcUfcaagugascsu | 1696 | AGUCACUUGAGGAGGCGAGUCUA | 1755 |
| AD-1636762.1 | csasagauuuGfCfAfacuugcuacaL96 | 1618 | usdGsuadGedAaguudGcAfaaucuugscsu | 1697 | AGCAAGAUUUGCAACUUGCUACC | 1756 |
| AD-1636764.1 | usgsccaaaaCfAfAfccaucaccguL96 | 1619 | asdCsggdTgdAuggudTgUfuuuggcasusc | 1698 | GAUGCCAAAACAACCAUCACCGU | 1757 |
| AD-1636765.1 | cscsauuaggAfUfAfaugucuuauuL96 | 1620 | asdAsuadAgdAcauudAuCfcuaauggsgsu | 1699 | ACCCAUUAGGAUAAUGUCUUAUG | 1758 |
| AD-1636768.1 | ususaccuguUfGfAfauuuuguauuL96 | 1621 | asdAsuadCadAaauudCaAfcagguaascsa | 1700 | UGUUACCUGUUGAAUUUUGUAUU | 1759 |
| AD-518942.2 | usgsccaaAfaCfAfAfccaucaccguL96 | 1622 | asCfsgguGfaUfGfguugUfuUfuggcasusc | 1701 | GAUGCCAAAACAACCAUCACCGU | 1757 |
| AD-518942.3 | usgsccaaAfaCfAfAfccaucaccguL96 | 1622 | asCfsgguGfaUfGfguugUfuUfuggcasusc | 1701 | GAUGCCAAAACAACCAUCACCGU | 1757 |
| AD-518942.4 | usgsccaaAfaCfAfAfccaucaccguL96 | 1622 | asCfsgguGfaUfGfguugUfuUfuggcasusc | 1701 | GAUGCCAAAACAACCAUCACCGU | 1757 |
| AD-519346.5 | cscsauuaGfgAfUfAfaugucuuauuL96 | 1623 | asAfsuaaGfaCfAfuuauCfcUfaauggsgsu | 1702 | ACCCAUUAGGAUAAUGUCUUAUG | 1758 |
| AD-519346.6 | cscsauuaGfgAfUfAfaugucuuauuL96 | 1623 | asAfsuaaGfaCfAfuuauCfcUfaauggsgsu | 1702 | ACCCAUUAGGAUAAUGUCUUAUG | 1758 |
| AD-519346.7 | cscsauuaGfgAfUfAfaugucuuauuL96 | 1623 | asAfsuaaGfaCfAfuuauCfcUfaauggsgsu | 1702 | ACCCAUUAGGAUAAUGUCUUAUG | 1758 |
| AD-519350.6 | usasggauAfaUfGfUfcuuauguaauL96 | 1624 | asUfsuacAfuAfAfgacaUfuAfuccuasasu | 1703 | AUUAGGAUAAUGUCUUAUGUAAU | 1739 |
| AD-519354.4 | asusaaugUfcUfUfAfuguaaugcuuL96 | 1625 | asAfsgcaUfuAfCfauaaGfaCfauuauscsc | 1704 | GGAUAAUGUCUUAUGUAAUGCUG | 1743 |
| AD-519757.6 | csusgaguUfgGfUfUfuuaugaaaauL96 | 780 | asUfsuuuCfaUfAfaaacCfaAfcucagscsu | 1705 | AGCUGAGUUGGUUUUAUGAAAAG | 1370 |
| AD-519780.2 | asgsgaagCfaAfCfCfuuucgccuguL96 | 1626 | asCfsaggCfgAfAfagguUfgCfuuccusasg | 1706 | CUAGGAAGCAACCUUUCGCCUGU | 1754 |
| AD-519933.3 | asgscaugAfgGfUfUfcuuagaauguL96 | 1627 | asCfsauuCfuAfAfgaacCfuCfaugcusgsg | 1707 | CCAGCAUGAGGUUCUUAGAAUGA | 1753 |
| AD-520053.7 | ususuuagAfaCfAfCfcuuuuucacuL96 | 1628 | asGfsugaAfaAfAfggugUfuCfuaaaasusu | 1708 | AAUUUUAGAACACCUUUUUCACC | 1744 |
| AD-520061.6 | csasccuuUfuUfCfAfccuaacuaauL96 | 799 | asUfsuagUfuAfGfgugaAfaAfaggugsusu | 1709 | AACACCUUUUUCACCUAACUAAA | 1389 |
| AD-67526.5 | gsgsccuuAfuCfCfCfuccuuccuuaL96 | 1629 | usAfsaggAfaGfGfagggAfuAfaggccsasc | 1710 | GUGGCCUUAUCCCUCCUUCCUUC | 1745 |
| AD-67551.7 | asusacauGfaGfCfAfagauuugcaaL96 | 1630 | usUfsgcaAfaUfCfuugcUfcAfuguauscsc | 1711 | GGAUACAUGAGCAAGAUUUGCAA | 1303 |
| AD-67554.11 | uscsugagCfuGfAfGfuugguuuuauL96 | 774 | asUfsaaaAfcCfAfacucAfgCfucagasgsg | 1712 | CCUCUGAGCUGAGUUGGUUUUAU | 1364 |
| AD-67560.7 | csusauuaAfuGfGfUfcagacuguuaL96 | 1631 | usAfsacaGfuCfUfgaccAfuUfaauagsgsg | 1713 | CCCUAUUAAUGGUCAGACUGUUC | 1747 |
| AD-67561.3 | usgsgauaCfaUfGfAfgcaagauuuaL96 | 1632 | usAfsaauCfuUfGfcucaUfgUfauccascsc | 1714 | GGUGGAUACAUGAGCAAGAUUUG | 1746 |
| AD-67564.3 | uscsacuuGfaGfGfAfggcgagucuaL96 | 1633 | usAfsgacUfcGfCfcuccUfcAfagugascsu | 1715 | AGUCACUUGAGGAGGCGAGUCUA | 1755 |
| AD-67565.3 | asusguuaGfuAfGfAfauaagccuuaL96 | 1634 | usAfsaggCfuUfAfuucuAfcUfaacauscsu | 1716 | AGAUGUUAGUAGAAUAAGCCUUA | 1740 |
| AD-67567.3 | ususgguuUfuAfUfGfaaaagcuagaL96 | 1635 | usCfsuagCfuUfUfucauAfaAfaccaascsu | 1717 | AGUUGGUUUUAUGAAAAGCUAGG | 1374 |
| AD-67568.3 | gscsacagGfgAfAfCfcucuaccuuaL96 | 1636 | usAfsaggUfaGfAfgguuCfcCfugugcsasg | 1718 | CUGCACAGGGAACCUCUACCUUC | 1250 |
| AD-67573.3 | usgsgugaCfaUfGfGfcuuccagauaL96 | 1637 | usAfsucuGfgAfAfgccaUfgUfcaccasgsu | 1719 | ACUGGUGACAUGGCUUCCAGAUA | 1443 |
| AD-67575.11 | ususaccuGfuUfGfAfauuuuguauuL96 | 1638 | asAfsuacAfaAfAfuucaAfcAfgguaascsa | 1720 | UGUUACCUGUUGAAUUUUGUAUU | 1759 |
| AD-67575.12 | ususaccuGfuUfGfAfauuuuguauuL96 | 1638 | asAfsuacAfaAfAfuucaAfcAfgguaascsa | 1720 | UGUUACCUGUUGAAUUUUGUAUU | 1759 |
| AD-67575.13 | ususaccuGfuUfGfAfauuuuguauuL96 | 1638 | asAfsuacAfaAfAfuucaAfcAfgguaascsa | 1720 | UGUUACCUGUUGAAUUUUGUAYY | 1759 |
| AD-67577.7 | csgsacauCfuGfCfCfcuaaagucaaL96 | 1639 | usUfsgacUfuUfAfgggcAfgAfugucgsusa | 1721 | UACGACAUCUGCCCUAAAGUCAA | 1240 |
| AD-67578.3 | gsusgaguGfaCfAfAfcguacccuuaL96 | 1640 | usAfsaggGfuAfCfguugUfcAfcucacsusc | 1722 | GAGUGAGUGACAACGUACCCUUC | 1229 |
| AD-67582.6 | gsusgcuaAfaGfUfUfucccaucuuuL96 | 1641 | asAfsagaUfgGfGfaaacUfuUfagcacscsu | 1723 | AGGUGCUAAAGUUUCCCAUCUUU | 1749 |
| AD-67583.7 | csasagauUfuGfCfAfacuugcuacaL96 | 1642 | usGfsuagCfaAfGfuugcAfaAfucuugscsu | 1724 | AGCAAGAUUUGCAACUUGCUACC | 1756 |
| AD-67584.8 | cscsuaacUfaAfAfAfuaauguuuaaL96 | 1643 | usUfsaaaCfaUfUfauuuUfaGfuuaggsusg | 1725 | CACCUAACUAAAAUAAUGUUUAA | 1399 |
| AD-67586.3 | usgsggagAfgAfUfAfugccuucgaaL96 | 1644 | usUfscgaAfgGfCfauauCfuCfucccasgsc | 1726 | GCUGGGAGAGAUAUGCCUUCGAG | 1261 |
| AD-67589.6 | asascuugCfuAfCfCfcauuaggauaL96 | 1645 | usAfsuccUfaAfUfggguAfgCfaaguusgsc | 1727 | GCAACUUGCUACCCAUUAGGAUA | 1313 |
| AD-67605.10 | ascscuguUfgAfAfUfuuuguauuauL96 | 814 | asUfsaauAfcAfAfaauuCfaAfcaggusasa | 1728 | UUACCUGUUGAAUUUUGUAUUAU | 1404 |
| AD-75247.4 | asasaugaAfaGfAfCfaaagguggauL96 | 1646 | asUfsccaCfcUfUfugucUfuUfcauuuscsu | 1729 | AGAAAUGAAAGACAAAGGUGGAU | 1752 |
| AD-75265.5 | csasugagCfaAfGfAfuuugcaacuuL96 | 844 | asAfsguuGfcAfAfaucuUfgCfucaugsusa | 1730 | UACAUGAGCAAGAUUUGCAACUU | 1434 |
| AD-75269.3 | usgsagugAfaGfAfAfaugaaagacaL96 | 1647 | usGfsucuUfuCfAfuuucUfuCfacucasgsu | 1731 | ACUGAGUGAAGAAAUGAAAGACA | 1741 |
| AD-75270.4 | usasccugUfuGfAfAfuuuuguauuaL96 | 1648 | usAfsauaCfaAfAfauucAfaCfagguasasc | 1732 | GUUACCUGUUGAAUUUUGUAUUA | 1750 |
| AD-75272.3 | ususgcuaCfcCfAfUfuaggauaauaL96 | 1649 | usAfsuuaUfcCfUfaaugGfgUfagcaasgsu | 1733 | ACUUGCUACCCAUUAGGAUAAUG | 1751 |
| AD-75274.6 | ususauguAfaUfGfCfugcccuguaaL96 | 1650 | usUfsacaGfgGfCfagcaUfuAfcauaasgsa | 1734 | UCUUAUGUAAUGCUGCCCUGUAC | 1748 |
| AD-75275.3 | gsasuuugCfaAfCfUfugcuacccauL96 | 1651 | asUfsgggUfaGfCfaaguUfgCfaaaucsusu | 1735 | AAGAUUUGCAACUUGCUACCCAU | 1742 |

### Example 4. In Vivo Screening of dsRNA Duplexes in Mice

[0701] Duplexes of interest, identified from the above in vitro studies, were evaluated in vivo. In particular, at pre-dose day −14 wild-type mice (C57BL/6) were transduced with 2×10¹⁰ viral particles of an adeno-associated virus 8 (AAV8) vector encoding human PNPLA3 by intravenous administration. In particular, mice were administered an AAV8 encoding a portion of human PNPLA3 mRNA encoding the open reading frame and 3′ UTR of human PNPLA3 mRNA referenced as NM_025225.2, referred to as AAV8-TBG-PI-PNPLA3.

[0702] At day 0, groups of three mice were subcutaneously administered a single 10 mg/kg dose of the agents of interest or PBS control. Table 8 provides the treatment groups and Table 9 provides the duplexes of interest. At day 14 post-dose animals were sacrificed, liver samples were collected and snap-frozen in liquid nitrogen. Liver mRNA was extracted and analyzed by the RT-QPCR method.

[0703] Human PNPLA3 mRNA levels were compared to a housekeeping gene, GAPDH. The values were then normalized to the average of PBS vehicle control group. The data were expressed as percent of baseline value, and presented as mean plus standard deviation. The results, listed in Table 10 and shown in FIG. 2, demonstrate that the exemplary duplex agents tested effectively reduce the level of the human PNPLA3 messenger RNA in vivo.

TABLE 8
Treatment Groups

| Group # | Duplex ID | Treatment |
|---|---|---|
| 1 | PBS | n/a |
| 2 | AD-519347.20 | 10 mg/kg siRNA |
| 3 | AD-1526902.2 | Day 14 |
| 4 | AD-1526891.3 | |
| 5 | AD-1526820.3 | |
| 6 | AD-1526960.2 | |
| 7 | AD-1526996.2 | |
| 8 | AD-1526999.2 | |
| 9 | AD-1526987.2 | |
| 10 | AD-1526846.3 | |
| 11 | AD-1526993.2 | |
| 12 | AD-1526961.2 | |
| 13 | AD-1526989.2 | |
| 14 | AD-1526988.2 | |

TABLE 9
Duplexes of Interest

| Duplex ID | Range in NM_025225.2 |
|---|---|
| AD-519347.20 | |
| AD-1526902.2 | 1201-1223 |
| AD-1526891.3 | 1182-1204 |
| AD-1526820.3 | 687-709 |
| AD-1526960.2 | 1738-1760 |
| AD-1526996.2 | 2186-2208 |
| AD-1526999.2 | 2122-2144 |
| AD-1526987.2 | 2176-2198 |
| AD-1526846.3 | 872-894 |
| AD-1526993.2 | 2183-2205 |
| AD-1526961.2 | 1739-1761 |
| AD-1526989.2 | 2178-2200 |
| AD-1526988.2 | 2177-2199 |

[0704] The unmodified nucleotide sequences of the sense and antisense strands of duplex AD-519347 are: Sense 5′-CAUUAGGAUAAUGUCUUAUGU-3′; Antisense 5′-ACAUAAGACAUUAUCCUAAUGGG-3′.

[0705] The modified nucleotide sequences of the sense and antisense strands of duplex AD-519347 are: Sense 5′-csasuuagGfaUfAfAfugucuuauguL96-3′; Antisense 5′-asCfsauaAfgAfCfauuaUfcCfuaaugsgsg-3′.

TABLE 10

| Groups | % message remaining | SD |
|---|---|---|
| PBS | 100.00 | 14.10 |
| AD-519347.20 | 28.57 | 9.24 |
| AD-1526902.2 | 32.75 | 13.07 |
| AD-1526891.3 | 34.84 | 7.36 |
| AD-1526820.3 | 43.33 | 3.45 |
| AD-1526960.2 | 53.52 | 16.89 |
| AD-1526996.2 | 53.71 | 23.02 |
| AD-1526999.2 | 62.92 | 13.49 |
| AD-1526987.2 | 79.77 | 5.36 |
| AD-1526846.3 | 86.01 | 32.26 |
| AD-1526993.2 | 91.77 | 19.92 |
| AD-1526961.2 | 100.00 | 15.56 |
| AD-1526989.2 | 108.14 | 57.72 |
| AD-1526988.2 | 133.47 | 43.79 |

Informal Sequence Listing

SEQ ID NO: 1
>NM_025225. 2 Homo sapiens patatin like phospholipase domain containing 3
(PNPLA3) , mRNA
ATGGTCCGAGGGGGGCGGGGCTGACGTCGCGCTGGGAATGCCCTGGCCGAGACACTGAGGCAGGGTAGAG
AGCGCTTGCGGGCGCCGGGCGGAGCTGCTGCGGATCAGGACCCGAGCCGATTCCCGATCCCGACCCAGAT
CCTAACCCGCGCCCCCGCCCCGCCGCCGCCGCCATGTACGACGCAGAGCGCGGCTGGAGCTTGTCCTTCG
CGGGCTGCGGCTTCCTGGGCTTCTACCACGTCGGGGCGACCCGCTGCCTGAGCGAGCACGCCCCGCACCT
CCTCCGCGACGCGCGCATGTTGTTCGGCGCTTCGGCCGGGGCGTTGCACTGCGTCGGCGTCCTCTCCGGT
ATCCCGCTGGAGCAGACTCTGCAGGTCCTCTCAGATCTTGTGCGGAAGGCCAGGAGTCGGAACATTGGCA
TCTTCCATCCATCCTTCAACTTAAGCAAGTTCCTCCGACAGGGTCTCTGCAAATGCCTCCCGGCCAATGT
CCACCAGCTCATCTCCGGCAAAATAGGCATCTCTCTTACCAGAGTGTCTGATGGGGAAAACGTTCTGGTG
TCTGACTTTCGGTCCAAAGACGAAGTCGTGGATGCCTTGGTATGTTCCTGCTTCATCCCCTTCTACAGTG
GCCTTATCCCTCCTTCCTTCAGAGGCGTGCGATATGTGGATGGAGGAGTGAGTGACAACGTACCCTTCAT
TGATGCCAAAACAACCATCACCGTGTCCCCCTTCTATGGGGAGTACGACATCTGCCCTAAAGTCAAGTCC
ACGAACTTTCTTCATGTGGACATCACCAAGCTCAGTCTACGCCTCTGCACAGGGAACCTCTACCTTCTCT
CGAGAGCTTTTGTCCCCCCGGATCTCAAGGTGCTGGGAGAGATATGCCTTCGAGGATATTTGGATGCATT
CAGGTTCTTGGAAGAGAAGGGCATCTGCAACAGGCCCCAGCCAGGCCTGAAGTCATCCTCAGAAGGGATG
GATCCTGAGGTCGCCATGCCCAGCTGGGCAAACATGAGTCTGGATTCTTCCCCGGAGTCGGCTGCCTTGG
CTGTGAGGCTGGAGGGAGATGAGCTGCTAGACCACCTGCGTCTCAGCATCCTGCCCTGGGATGAGAGCAT
CCTGGACACCCTCTCGCCCAGGCTCGCTACAGCACTGAGTGAAGAAATGAAAGACAAAGGTGGATACATG
AGCAAGATTTGCAACTTGCTACCCATTAGGATAATGTCTTATGTAATGCTGCCCTGTACCCTGCCTGTGG
AATCTGCCATTGCGATTGTCCAGAGACTGGTGACATGGCTTCCAGATATGCCCGACGATGTCCTGTGGTT
GCAGTGGGTGACCTCACAGGTGTTCACTCGAGTGCTGATGTGTCTGCTCCCCGCCTCCAGGTCCCAAATG
CCAGTGAGCAGCCAACAGGCCTCCCCATGCACACCTGAGCAGGACTGGCCCTGCTGGACTCCCTGCTCCC
CCAAGGGCTGTCCAGCAGAGACCAAAGCAGAGGCCACCCCGCGGTCCATCCTCAGGTCCAGCCTGAACTT
CTTCTTGGGCAATAAAGTACCTGCTGGTGCTGAGGGGCTCTCCACCTTTCCCAGTTTTTCACTAGAGAAG
AGTCTGTGAGTCACTTGAGGAGGCGAGTCTAGCAGATTCTTTCAGAGGTGCTAAAGTTTCCCATCTTTGT
GCAGCTACCTCCGCATTGCTGTGTAGTGACCCCTGCCTGTGACGTGGAGGATCCCAGCCTCTGAGCTGAG
TTGGTTTTATGAAAAGCTAGGAAGCAACCTTTCGCCTGTGCAGCGGTCCAGCACTTAACTCTAATACATC
AGCATGCGTTAATTCAGCTGGTTGGGAAATGACACCAGGAAGCCCAGTGCAGAGGGTCCCTTACTGACTG
TTTCGTGGCCCTATTAATGGTCAGACTGTTCCAGCATGAGGTTCTTAGAATGACAGGTGTTTGGATGGGT
GGGGGCCTTGTGATGGGGGGTAGGCTGGCCCATGTGTGATCTTGTGGGGTGGAGGGAAGAGAATAGCATG
ATCCCACTTCCCCATGCTGTGGGAAGGGGTGCAGTTCGTCCCCAAGAACGACACTGCCTGTCAGGTGGTC
TGCAAAGATGATAACCTTGACTACTAAAAACGTCTCCATGGCGGGGGTAACAAGATGATAATCTACTTAA
TTTTAGAACACCTTTTTCACCTAACTAAAATAATGTTTAAAGAGTTTTGTATAAAAATGTAAGGAAGCGT
TGTTACCTGTTGAATTTTGTATTATGTGAATCAGTGAGATGTTAGTAGAATAAGCCTTAAAAAAAAAAAA
ATCGGTTGGGTGCAGTGGCACACGGCTGTAATCCCAGCACTTTGGGAGGCCAAGGTTGGCAGATCACCTG
AGGTCAGGAGTTCAAGACCAGTCTGGCCAACATAGCAAAACCCTGTCTCTACTAAAAATACAAAAATTAT
CTGGGCATGGTGGTGCATGCCTGTAATCCCAGCTATTCGGAAGGCTGAGGCAGGAGAATCACTTGAACCC
AGGAGGCGGAGGTTGCGGTGAGCTGAGATTGCACCATTTCATTCCAGCCTGGGCAACATGAGTGAAAGTC
TGACTCAAAAAAAAAAAATTTAAAAAACAAAATAATCTAGTGTGCAGGGCATTCACCTCAGCCCCCCAGG
CAGGAGCCAAGCACAGCAGGAGCTTCCGCCTCCTCTCCACTGGAGCACACAACTTGAACCTGGCTTATTT
TCTGCAGGGACCAGCCCCACATGGTCAGTGAGTTTCTCCCCATGTGTGGCGATGAGAGAGTGTAGAAATA
AAGAC
SEQ ID NO: 2
>reverse complement of SEQ ID NO. 1
GTCTTTATTTCTACACTCTCTCATCGCCACACATGGGGAGAAACTCACTGACCATGTGGGGCTGGTCCCTGCAGA
AAATAAGCCAGGTTCAAGTTGTGTGCTCCAGTGGAGAGGAGGCGGAAGCTCCTGCTGTGCTTGGCTCCTGCCTGG
GGGGCTGAGGTGAATGCCCTGCACACTAGATTATTTTGTTTTTTAAATTTTTTTTTTTTGAGTCAGACTTTCACT
CATGTTGCCCAGGCTGGAATGAAATGGTGCAATCTCAGCTCACCGCAACCTCCGCCTCCTGGGTTCAAGTGATTC
TCCTGCCTCAGCCTTCCGAATAGCTGGGATTACAGGCATGCACCACCATGCCCAGATAATTTTTGTATTTTTAGT
AGAGACAGGGTTTTGCTATGTTGGCCAGACTGGTCTTGAACTCCTGACCTCAGGTGATCTGCCAACCTTGGCCTC
CCAAAGTGCTGGGATTACAGCCGTGTGCCACTGCACCCAACCGATTTTTTTTTTTTTAAGGCTTATTCTACTAAC
ATCTCACTGATTCACATAATACAAAATTCAACAGGTAACAACGCTTCCTTACATTTTTATACAAAACTCTTTAAA
CATTATTTTAGTTAGGTGAAAAAGGTGTTCTAAAATTAAGTAGATTATCATCTTGTTACCCCCGCCATGGAGACG
TTTTTAGTAGTCAAGGTTATCATCTTTGCAGACCACCTGACAGGCAGTGTCGTTCTTGGGGACGAACTGCACCCC
TTCCCACAGCATGGGGAAGTGGGATCATGCTATTCTCTTCCCTCCACCCCACAAGATCACACATGGGCCAGCCTA
CCCCCCATCACAAGGCCCCCACCCATCCAAACACCTGTCATTCTAAGAACCTCATGCTGGAACAGTCTGACCATT
AATAGGGCCACGAAACAGTCAGTAAGGGACCCTCTGCACTGGGCTTCCTGGTGTCATTTCCCAACCAGCTGAATT
AACGCATGCTGATGTATTAGAGTTAAGTGCTGGACCGCTGCACAGGCGAAAGGTTGCTTCCTAGCTTTTCATAAA
ACCAACTCAGCTCAGAGGCTGGGATCCTCCACGTCACAGGCAGGGGTCACTACACAGCAATGCGGAGGTAGCTGC
ACAAAGATGGGAAACTTTAGCACCTCTGAAAGAATCTGCTAGACTCGCCTCCTCAAGTGACTCACAGACTCTTCT
CTAGTGAAAAACTGGGAAAGGTGGAGAGCCCCTCAGCACCAGCAGGTACTTTATTGCCCAAGAAGAAGTTCAGGC
TGGACCTGAGGATGGACCGCGGGGTGGCCTCTGCTTTGGTCTCTGCTGGACAGCCCTTGGGGGAGCAGGGAGTCC
AGCAGGGCCAGTCCTGCTCAGGTGTGCATGGGGAGGCCTGTTGGCTGCTCACTGGCATTTGGGACCTGGAGGCGG
GGAGCAGACACATCAGCACTCGAGTGAACACCTGTGAGGTCACCCACTGCAACCACAGGACATCGTCGGGCATAT
CTGGAAGCCATGTCACCAGTCTCTGGACAATCGCAATGGCAGATTCCACAGGCAGGGTACAGGGCAGCATTACAT
AAGACATTATCCTAATGGGTAGCAAGTTGCAAATCTTGCTCATGTATCCACCTTTGTCTTTCATTTCTTCACTCA
GTGCTGTAGCGAGCCTGGGCGAGAGGGTGTCCAGGATGCTCTCATCCCAGGGCAGGATGCTGAGACGCAGGTGGT
CTAGCAGCTCATCTCCCTCCAGCCTCACAGCCAAGGCAGCCGACTCCGGGGAAGAATCCAGACTCATGTTTGCCC
AGCTGGGCATGGCGACCTCAGGATCCATCCCTTCTGAGGATGACTTCAGGCCTGGCTGGGGCCTGTTGCAGATGC
CCTTCTCTTCCAAGAACCTGAATGCATCCAAATATCCTCGAAGGCATATCTCTCCCAGCACCTTGAGATCCGGGG
GGACAAAAGCTCTCGAGAGAAGGTAGAGGTTCCCTGTGCAGAGGCGTAGACTGAGCTTGGTGATGTCCACATGAA
GAAAGTTCGTGGACTTGACTTTAGGGCAGATGTCGTACTCCCCATAGAAGGGGGACACGGTGATGGTTGTTTTGG
CATCAATGAAGGGTACGTTGTCACTCACTCCTCCATCCACATATCGCACGCCTCTGAAGGAAGGAGGGATAAGGC
CACTGTAGAAGGGGATGAAGCAGGAACATACCAAGGCATCCACGACTTCGTCTTTGGACCGAAAGTCAGACACCA
GAACGTTTTCCCCATCAGACACTCTGGTAAGAGAGATGCCTATTTTGCCGGAGATGAGCTGGTGGACATTGGCCG
GGAGGCATTTGCAGAGACCCTGTCGGAGGAACTTGCTTAAGTTGAAGGATGGATGGAAGATGCCAATGTTCCGAC
TCCTGGCCTTCCGCACAAGATCTGAGAGGACCTGCAGAGTCTGCTCCAGCGGGATACCGGAGAGGACGCCGACGC
AGTGCAACGCCCCGGCCGAAGCGCCGAACAACATGCGCGCGTCGCGGAGGAGGTGCGGGGCGTGCTCGCTCAGGC
AGCGGGTCGCCCCGACGTGGTAGAAGCCCAGGAAGCCGCAGCCCGCGAAGGACAAGCTCCAGCCGCGCTCTGCGT
CGTACATGGCGGCGGCGGCGGGGCGGGGGCGCGGGTTAGGATCTGGGTCGGGATCGGGAATCGGCTCGGGTCCTG
ATCCGCAGCAGCTCCGCCCGGCGCCCGCAAGCGCTCTCTACCCTGCCTCAGTGTCTCGGCCAGGGCATTCCCAGC
GCGACGTCAGCCCCGCCCCCCTCGGACCAT
SEQ ID NO: 3
>gi|144226244|ref|NM_054088.3|Mus musculus patatin-like phospholipase
domain containing 3 (Pnpla3), mRNA
AGAGCAGCAACACCGGGAGCAGAGCTGAACTGCAGCGCCGCCCGGAGCTTCAAGCACCATGTATGACCCA
GAGCGCCGCTGGAGCCTGTCGTTTGCAGGCTGCGGCTTCCTGGGCTTCTACCACGTCGGGGCTACGCTAT
GTCTGAGCGAGCGCGCCCCGCACCTCCTCCGCGATGCGCGCACTTTCTTTGGCTGCTCGGCCGGTGCACT
GCACGCGGTCACCTTCGTGTGCAGTCTCCCTCTCGGCCGTATAATGGAGATCCTCATGGACCTCGTGCGG
AAAGCCAGGAGCCGCAACATCGGCACCCTCCACCCGTTCTTCAACATTAACAAGTGCATCAGAGACGGGC
TCCAGGAGAGCCTCCCAGACAATGTCCACCAGGTCATTTCTGGCAAGGTTCACATCTCACTCACCAGGGT
GTCGGATGGGGAGAACGTGCTGGTGTCTGAGTTCCATTCCAAAGACGAAGTCGTGGATGCCCTGGTGTGT
TCCTGCTTCATTCCCCTCTTCTCTGGCCTAATCCCTCCTTCCTTCCGAGGCGAGCGGTACGTGGACGGAG
GAGTGAGCGACAACGTCCCTGTGCTGGATGCCAAAACCACCATCACGGTGTCACCTTTCTACGGTGAGCA
TGACATCTGCCCCAAAGTCAAGTCCACCAACTTCTTCCACGTGAATATCACCAACCTCAGCCTCCGCCTC
TGCACTGGGAACCTCCAACTTCTGACCAGAGCGCTCTTCCCGTCTGATGTGAAGGTGATGGGAGAGCTGT
GCTATCAAGGGTACCTGGACGCCTTCCGGTTCCTGGAGGAGAATGGCATCTGTAACGGGCCACAGCGCAG
CCTGAGTCTGTCCTTGGTGGCGCCAGAAGCCTGCTTGGAAAATGGCAAACTTGTGGGAGACAAGGTGCCA
GTCAGCCTATGCTTTACAGATGAGAACATCTGGGAGACACTGTCCCCCGAGCTCAGCACAGCTCTGAGTG
AAGCGATTAAGGACAGGGAGGGCTACCTGAGCAAAGTCTGCAACCTCCTGCCCGTCAGGATCCTGTCCTA
CATCATGCTGCCCTGCAGTCTGCCCGTGGAGTCGGCTATCGCTGCAGTCCACAGGCTGGTGACATGGCTC
CCTGATATCCAGGATGATATCCAGTGGCTACAATGGGCGACATCCCAGGTTTGTGCCCGAATGACGATGT
GCCTGCTCCCCTCTACCAGGTAAATACTTGGGCCCAGGGTGTGTGGGCCAGATAGGCATCCCTCCCGGTT
GTTCCCAGAGCTCTTAGGGTCAGAGCTTGGGTGGTGACAGCCTTAACAAGCCAGGCTCAGCCGCCTGTCC
CCAGCATGCCATTAAAGAAACCGGTAGCAGAGAAAGCAGGTTTATTCGAATATAAAAAGGTTCAAGCCCC
CACCCGGTTAATCTTTAAGATACCAACAGGAGGCTTAAGTTTAAACAGAGTTACACATAAACAGTCTGAA
TCAGGGCGTGGTCCTGCCCACCATTGTCTGGGCTTCAAGGTTCCTTCTTTCTCTCCCTAGCATGAGATTC
CTGGGACAATCCCAATTCCTTGGCCTCCATTGTATCAAAGGGCTGAAAACCAAAGGGAAGGCACAGCTGT
CTCTTCAGCATGCCTCTTCTGCCAGAACCACTGCAAGGTTTGGTGCTCAGGCTGTGCAAACATTCTAGCA
ATGTTTGACTCAGTGTCAAGCAGGTGACAAGGAACATGGTGCTGTGTGGGGGGAACCCATGGCCCAGGTG
AGGGCTTATTGGTGGGTGAAGCTGTGGGTGTTCAGGTGGTGGAGAAGGCCTTAAGGGATGGGACTGACAC
CTCAGCACTGAAGGCAGGAGGAAGCTGTGGCTCTGGGTTGCACCCCTGCCTGGCTCCACCCTCTCTGGCA
TCTGTAGAAGTTACAGCTGGTTCTTCCTCTCAGCCCCATGCTCCCAGAAATAAGACTCAGACCCAAATTA
TAGTTACAAATACCTTGGCCATATAGCTAGGCTCTTCTCAGACTAGCTCATAACTTAACTCATTAATTTT
AACCTCCATCCTGCCACATGGCTGGTGGCCTGTGCTCAGGTACCATGAGTCCAGCTCTTCACATCTTTCC
GGATGAATCTTCCATAATTCTTTCTGCCTCCTGGATGTTCCACCTTCTATTCCACCTTTTCCTATAGGCC
ATGGTTTTGTTTTTGTTTTTTTTTTCCAAATTTAATTTAATTAATTAATTTATTTATTTTTGGTTTTTCG
AGACAGGGTTTCTCTGTATCGCCCTGGCTGTCCTGGAACTCACTATGTAAGCCAGGCTGGCCTCAAACTC
AGAAATCCGCCTGCCTCTGCCTCCTGAGTGCTGGGATTAAAGGCGTGCGCAACCATGCCCGGTGTGGTTT
TTTTTTTTTTTTAATTGACAGGTGGATGCATCTATATAATCCATAACATATTCTCTCTACAGGTATCTAT
TAGGTTTTGGGTGAGGTGTGGAGTTCTAGGGAACTCTGAGAGAAATTCCTGGGGAGTAAGTGGTTTATCA
AGTTGATTGGAGGAGTTTTTAATGCTATGGACAGACAGACAGAAGGACAACAGCATAGTCGGGGCTACCA
GGGAGTTCAGGCCCCGGCATCGGAGATAGAAGCAGGATGGGGTCTTTGAAGAGATTCTGAGCCCACACAG
CAGAGGAGGGACTCTCTCTTTAGAGCTTTTGAGGATGAGGGAGGTTGACTGCAAGAGCCTACAGCCAGGC
TCGAGGCAGGCAGGGGGTGGGGAGCAGGATGTAAACCCCTTCGATGCTGACAGACTCACTTCTGGGGTAA
AATATTATGAGATGCCTGTCAGTGTCTGTGAAGAGACCTGAGCAGAGTCTGGATTCTGACATCAATCATG
TTCTTACAATACTGAAGACCTGAGAGCCTGCAATCTTGGTTTGTAAATTGCTGGTCTCCGTGCTTCCAGT
GAACTTGGACATTCTTCTCATGGTTGGTCCAGGAGAGGCCAAAGCTGAGGGCACCCTGCCTTCCACCCCC
AGTCCAGCTTGACCTTTTATCTGGAGCAACAGTGTCTAGATGATGGGTGGGTGAGGGGTGCTATACTGTC
TGTCCCTCTGGGAAGGGTTCTGTTACTTTTGGAGGCAGCTAGGAAGTTTCTCTGTGCAGCTGCCCCCTGG
TGCTGTGTGGTGACCTCATTGCCTGTGACCCCAGGATCACAGGATCTGGGCTAAAGTGGTAGTCCATAGA
AACCAAAGACAATGATTTGGTGTTTAGAAAGCTACTCTTGGTCTGGGTGAAGTCTGGTGCTTAAGGGCTA
TCACAAAGAGCGTGTCAAACCATCTCTCAGCCTGTGAGTCAGTGGGGAGCCCAAGGGCATCAGTGTTTGG
AAACTGGAATCCAAACCGGGCAATCTCGGAAGGAAACTGTTTAGGAATTGTGATGGGACGGGCCGTGGCT
GTCTCTGAAAAGGGCCTGCCAGATAACTTATTACTTTTAAGGACACCTTTGGCTCTTACTAATTTATAAA
GCATTTTATATAAACACACCAGGGAGTGCATGGTGAACTACACGTATGATCAGTTAAGTGGGGCTAGAAT
TAGGTAGGGAGAGCATCGGACCTCTGCCTCCTCAACCTCAACTTGCTTGCTTTCTCCACTGGCTCCAAAT
CTTTGTATAGTCATCAGCCATGACCACCTCTCTCCCTCCCCATCTACTACCAGCAGCGTTAATGGGAATA
AGTACCCACTTCTCTCAGGTGTACTATACAGCTGTGGGTGTGGTGTGTGTTTCCTGTAATTCACACTTTA
GAAAGGAAACAAGCAAACAAAAGAAACCAGGTGCTGCCCATACTCCTAAGTGTAGACAGTGAAGGTGTGT
GTCTCCCATGCCTGAGTCTCCTGGAGGCCTAGTGAGCTCCAGGTTCATGCAAGCACATCAGGAGGAATCA
TATAATCTCAGCACGGTTGATCCAGATGGGATAAGAAAGGACTCTGGGAGAGAGAATGTGGTTCTAGAGA
CAAAGTGTCTAGGCTACACAGAAGATAAGACTGTCCCAAGGAAAGAAAAGAAACCAGGAACTAGGGTGCA
GCTCAGTIGTCAGAGGACTTCTCTAGGCTTGAAGCCCAGAGTCCAATCTCAGCACCTTATAAACTGTGGA
GTGACAGGCAGTGACATCGGCCTGTAATCCCAACACTCAAGCAGTAGAGGCAAGAGGATCATAAGTTCAA
GGTCTTCCTTGGCTATTTAGGGAGTTGGAGGTTAGCTCTGGCTACATGAGACCCTGTCTCAAAAAAAAAA
AAAAAAAAAAGTAGAAACTTCTGCCTTGCTTTGAGCTGCCCCTTTCTGGACGTTTCTCATCAGTAGAGAA
TATTCCTGCCACCCTATCAGACAAAACTCCCACTGGTTTGGAGTCTCTCCATTCTCAGGAACACCTCAGG
AGTCAGACAGTGAGCAGCAGGGAGCAATGTCTTGACTTGTAAGCCCCTTAGCAAGGCTGGTTCATTTGTT
TATTAAAAGCAGGTGTGGGTGAATTTATGCAAATGAGTATGCAAACTAGTGGAACAGCAGAAGGATTGAA
TGGATACACCAAAAATAACCACAACTGTTTAAGGGAAAAGGGTCCATAATAAATGTGGGGAACAAAAAAC
AAATAAATGTGATTTTTTTTAGAAAAATG
SEQ ID NO: 4
>reverse complement of SEQ ID NO: 3
CATTTTTCTAAAAAAAATCACATTTATTTGTTTTTTGTTCCCCACATTTATTATGGACCCTTTTCCCTTAAACAG
TTGTGGTTATTTTTGGTGTATCCATTCAATCCTTCTGCTGTTCCACTAGTTTGCATACTCATTTGCATAAATTCA
CCCACACCTGCTTTTAATAAACAAATGAACCAGCCTTGCTAAGGGGCTTACAAGTCAAGACATTGCTCCCTGCTG
CTCACTGTCTGACTCCTGAGGTGTTCCTGAGAATGGAGAGACTCCAAACCAGTGGGAGTTTTGTCTGATAGGGTG
GCAGGAATATTCTCTACTGATGAGAAACGTCCAGAAAGGGGCAGCTCAAAGCAAGGCAGAAGTTTCTACTTTTTT
TTTTTTTTTTTTTTGAGACAGGGTCTCATGTAGCCAGAGCTAACCTCCAACTCCCTAAATAGCCAAGGAAGACCT
TGAACTTATGATCCTCTTGCCTCTACTGCTTGAGTGTTGGGATTACAGGCCGATGTCACTGCCTGTCACTCCACA
GTTTATAAGGTGCTGAGATTGGACTCTGGGCTTCAAGCCTAGAGAAGTCCTCTGACAACTGAGCTGCACCCTAGT
TCCTGGTTTCTTTTCTTTCCTTGGGACAGTCTTATCTTCTGTGTAGCCTAGACACTTTGTCTCTAGAACCACATT
CTCTCTCCCAGAGTCCTTTCTTATCCCATCTGGATCAACCGTGCTGAGATTATATGATTCCTCCTGATGTGCTTG
CATGAACCTGGAGCTCACTAGGCCTCCAGGAGACTCAGGCATGGGAGACACACACCTTCACTGTCTACACTTAGG
AGTATGGGCAGCACCTGGTTTCTTTTGTTTGCTTGTTTCCTTTCTAAAGTGTGAATTACAGGAAACACACACCAC
ACCCACAGCTGTATAGTACACCTGAGAGAAGTGGGTACTTATTCCCATTAACGCTGCTGGTAGTAGATGGGGAGG
GAGAGAGGTGGTCATGGCTGATGACTATACAAAGATTTGGAGCCAGTGGAGAAAGCAAGCAAGTTGAGGTTGAGG
AGGCAGAGGTCCGATGCTCTCCCTACCTAATTCTAGCCCCACTTAACTGATCATACGTGTAGTTCACCATGCACT
CCCTGGTGTGTTTATATAAAATGCTTTATAAATTAGTAAGAGCCAAAGGTGTCCTTAAAAGTAATAAGTTATCTG
GCAGGCCCTTTTCAGAGACAGCCACGGCCCGTCCCATCACAATTCCTAAACAGTTTCCTTCCGAGATTGCCCGGT
TTGGATTCCAGTTTCCAAACACTGATGCCCTTGGGCTCCCCACTGACTCACAGGCTGAGAGATGGTTTGACACGC
TCTTTGTGATAGCCCTTAAGCACCAGACTTCACCCAGACCAAGAGTAGCTTTCTAAACACCAAATCATTGTCTTT
GGTTTCTATGGACTACCACTTTAGCCCAGATCCTGTGATCCTGGGGTCACAGGCAATGAGGTCACCACACAGCAC
CAGGGGGCAGCTGCACAGAGAAACTTCCTAGCTGCCTCCAAAAGTAACAGAACCCTTCCCAGAGGGACAGACAGT
ATAGCACCCCTCACCCACCCATCATCTAGACACTGTTGCTCCAGATAAAAGGTCAAGCTGGACTGGGGGTGGAAG
GCAGGGTGCCCTCAGCTTTGGCCTCTCCTGGACCAACCATGAGAAGAATGTCCAAGTTCACTGGAAGCACGGAGA
CCAGCAATTTACAAACCAAGATTGCAGGCTCTCAGGTCTTCAGTATTGTAAGAACATGATTGATGTCAGAATCCA
GACTCTGCTCAGGTCTCTTCACAGACACTGACAGGCATCTCATAATATTTTACCCCAGAAGTGAGTCTGTCAGCA
TCGAAGGGGTTTACATCCTGCTCCCCACCCCCTGCCTGCCTCGAGCCTGGCTGTAGGCTCTTGCAGTCAACCTCC
CTCATCCTCAAAAGCTCTAAAGAGAGAGTCCCTCCTCTGCTGTGTGGGCTCAGAATCTCTTCAAAGACCCCATCC
TGCTTCTATCTCCGATGCCGGGGCCTGAACTCCCTGGTAGCCCCGACTATGCTGTTGTCCTTCTGTCTGTCTGTC
CATAGCATTAAAAACTCCTCCAATCAACTTGATAAACCACTTACTCCCCAGGAATTTCTCTCAGAGTTCCCTAGA
ACTCCACACCTCACCCAAAACCTAATAGATACCTGTAGAGAGAATATGTTATGGATTATATAGATGCATCCACCT
GTCAATTAAAAAAAAAAAAAAACCACACCGGGCATGGTTGCGCACGCCTTTAATCCCAGCACTCAGGAGGCAGAG
GCAGGCGGATTTCTGAGTTTGAGGCCAGCCTGGCTTACATAGTGAGTTCCAGGACAGCCAGGGCGATACAGAGAA
ACCCTGTCTCGAAAAACCAAAAATAAATAAATTAATTAATTAAATTAAATTTGGAAAAAAAAAACAAAAACAAAA
CCATGGCCTATAGGAAAAGGTGGAATAGAAGGTGGAACATCCAGGAGGCAGAAAGAATTATGGAAGATTCATCCG
GAAAGATGTGAAGAGCTGGACTCATGGTACCTGAGCACAGGCCACCAGCCATGTGGCAGGATGGAGGTTAAAATT
AATGAGTTAAGTTATGAGCTAGTCTGAGAAGAGCCTAGCTATATGGCCAAGGTATTTGTAACTATAATTTGGGTC
TGAGTCTTATTTCTGGGAGCATGGGGCTGAGAGGAAGAACCAGCTGTAACTTCTACAGATGCCAGAGAGGGTGGA
GCCAGGCAGGGGTGCAACCCAGAGCCACAGCTTCCTCCTGCCTTCAGTGCTGAGGTGTCAGTCCCATCCCTTAAG
GCCTTCTCCACCACCTGAACACCCACAGCTTCACCCACCAATAAGCCCTCACCTGGGCCATGGGTTCCCCCCACA
CAGCACCATGTTCCTTGTCACCTGCTTGACACTGAGTCAAACATTGCTAGAATGTTTGCACAGCCTGAGCACCAA
ACCTTGCAGTGGTTCTGGCAGAAGAGGCATGCTGAAGAGACAGCTGTGCCTTCCCTTTGGTTTTCAGCCCTTTGA
TACAATGGAGGCCAAGGAATTGGGATTGTCCCAGGAATCTCATGCTAGGGAGAGAAAGAAGGAACCTTGAAGCCC
AGACAATGGTGGGCAGGACCACGCCCTGATTCAGACTGTTTATGTGTAACTCTGTTTAAACTTAAGCCTCCTGTT
GGTATCTTAAAGATTAACCGGGTGGGGGCTTGAACCTTTTTATATTCGAATAAACCTGCTTTCTCTGCTACCGGT
TTCTTTAATGGCATGCTGGGGACAGGCGGCTGAGCCTGGCTTGTTAAGGCTGTCACCACCCAAGCTCTGACCCTA
AGAGCTCTGGGAACAACCGGGAGGGATGCCTATCTGGCCCACACACCCTGGGCCCAAGTATTTACCTGGTAGAGG
GGAGCAGGCACATCGTCATTCGGGCACAAACCTGGGATGTCGCCCATTGTAGCCACTGGATATCATCCTGGATAT
CAGGGAGCCATGTCACCAGCCTGTGGACTGCAGCGATAGCCGACTCCACGGGCAGACTGCAGGGCAGCATGATGT
AGGACAGGATCCTGACGGGCAGGAGGTTGCAGACTTTGCTCAGGTAGCCCTCCCTGTCCTTAATCGCTTCACTCA
GAGCTGTGCTGAGCTCGGGGGACAGTGTCTCCCAGATGTTCTCATCTGTAAAGCATAGGCTGACTGGCACCTTGT
CTCCCACAAGTTTGCCATTTTCCAAGCAGGCTTCTGGCGCCACCAAGGACAGACTCAGGCTGCGCTGTGGCCCGT
TACAGATGCCATTCTCCTCCAGGAACCGGAAGGCGTCCAGGTACCCTTGATAGCACAGCTCTCCCATCACCTTCA
CATCAGACGGGAAGAGCGCTCTGGTCAGAAGTTGGAGGTTCCCAGTGCAGAGGCGGAGGCTGAGGTTGGTGATAT
TCACGTGGAAGAAGTTGGTGGACTTGACTTTGGGGCAGATGTCATGCTCACCGTAGAAAGGTGACACCGTGATGG
TGGTTTTGGCATCCAGCACAGGGACGTTGTCGCTCACTCCTCCGTCCACGTACCGCTCGCCTCGGAAGGAAGGAG
GGATTAGGCCAGAGAAGAGGGGAATGAAGCAGGAACACACCAGGGCATCCACGACTTCGTCTTTGGAATGGAACT
CAGACACCAGCACGTTCTCCCCATCCGACACCCTGGTGAGTGAGATGTGAACCTTGCCAGAAATGACCTGGTGGA
CATTGTCTGGGAGGCTCTCCTGGAGCCCGTCTCTGATGCACTTGTTAATGTTGAAGAACGGGTGGAGGGTGCCGA
TGTTGCGGCTCCTGGCTTTCCGCACGAGGTCCATGAGGATCTCCATTATACGGCCGAGAGGGAGACTGCACACGA
AGGTGACCGCGTGCAGTGCACCGGCCGAGCAGCCAAAGAAAGTGCGCGCATCGCGGAGGAGGTGCGGGGCGCGCT
CGCTCAGACATAGCGTAGCCCCGACGTGGTAGAAGCCCAGGAAGCCGCAGCCTGCAAACGACAGGCTCCAGCGGC
GCTCTGGGTCATACATGGTGCTTGAAGCTCCGGGCGGCGCTGCAGTTCAGCTCTGCTCCCGGTGTTGCTGCTCT
SEQ ID NO: 5
>gi|537361027|ref|NM_001282324.1|Rattus norvegicus patatin-like
phospholipase domain containing 3 (Pnpla3), mRNA
CCCGGAGCAGAATTGAGCTGCATCGCCTTCCGGAGCCTCCAGCGCCATGTACGACCCAGAGCGCCGCTGG
AGCCTGTCGTTCGCAGGCTGCGGCTTCCTAGGCTTCTACCACATCGGGGCTACGCTATGTCTGAGCGAGC
GCGCTCCGCACATCCTCCGCGAAGCGCGCACTTTCTTCGGCTGCTCGGCCGGTGCACTGCACGCGGTCAC
CTTCGTGTGCAGTCTCCCTCTCGATCACATCATGGAGATCCTCATGGACCTCGTGCGGAAAGCCAGGAGC
CGCAACATCGGCACCCTCCACCCGTTCTTCAACATTAACAAGTGCGTCAGAGACGGCCTTCAGGAGACCC
TCCCAGACAACGTCCACCAGATCATTTCTGGCAAGGTTTACATCTCACTCACCAGAGTGTCCGATGGGGA
GAACGTGCTGGTGTCTGAGTTCCATTCCAAAGACGAAGTGGTGGATGCCCTGGTGTGCTCCTGCTTCATT
CCTCTCTTCTCTGGCCTAATCCCTCCTTCCTTCCGAGGTGAGCGGTACGTGGATGGAGGAGTGAGTGACA
ACGTCCCTGTGCTGGACGCCAAAACCACCATCACGGTGTCCCCTTTCTATGGTGAGCATGACATCTGTCC
CAAAGTGAAGTCCACCAACTTCCTCCAGGTGAATATCACCAACCTCAGTCTTCGTCTCTGCACTGGGAAC
CTTCATCTTCTGACCAGAGCACTCTTCCCATCTGATGTGAAGGTGATGGGAGAGCTGTGCTTTCAAGGGT
ACCTGGACGCCTTCCGGTTCCTGGAAGAGAACGGCATCTGTAATGGGCCACAGCGCAGCCTGAGTCTGTC
CTTGGAGAAGGAAATGGCGCCAGAAACCATGATACCCTGCTTGGAAAATGGCCACCTTGTAGCAGGGAAC
AAGGTGCCAGTAAGCTGTGTATGCCTTACAGCTGTGCCGTCGGATGAGAGCATCTGGGAGATGCTGTCCC
CCAAGCTCAGCACAGCTCTGACTGAAGCGATTAAAGACAGGGGGGGCTACCTGAACAAAGTCTGCAACCT
CCTGCCCATTAGGATCCTGTCCTACATCTTGCTGCCCTGCACTCTGCCCGTGGAGTCGGCCATCGCTGCA
GTCCACAGGCTGGTGATGTGGCTCCCTGATATCCATGAAGATATCCAGTGGCTACAGTGGGCAACATCCC
AGGTGTGTGCCCGAATGACCATGTGCCTGCTCCCCTCTACCAGATCCAGAGCATCCAAGGATAACCATCA
AACACTCAAGCATGGATATCACCCATCTCTCCACAAACCCCAAGGCAGCTCTGCCGGTTTGTAAATTGCT
GGTCTCCGTGCTTCCGATGAACTTGGGCATTCTCCCTGTGGATGGTTCCAGGAGAGGCCATAGCTGAAGG
CACTCTGCCTTCCACCCCAAGTCCAGTTTGACCTTTATCTAGAGCAACAGTGTCTAGATGATAGGTGGGT
GGGGGGTGCTGTCTCTCTGTTTCCCTCTGGGAAGGGTTCTGTTAACTTTTGGAGGCAGCTAGGAAATTTC
TCTCCAGGAGCTGAGCCTGTGCAGCTGCCCCCTTGGTGCTGTGTGGTAACCTCATTGCCTGTGACCCTAG
GATCATAGGATCTGGGCTAAATAGGTAGTTCATAGAAACCAAAGACAATAATTTGGTGTTTAGAAAACTA
CTTTTGGTCTGGGTGAAGTCTGGTGCTTGAGAGTTAGTGCAGAGAGAACGGTCAAACCGTCTCTCAGCCT
GTGGATCTATGGGGATTCCAAGGGCTTCAGTGTTTGGAAACGGCAATCCAAACGGGCAATCTTGTGCAAT
CTTGGAAGGAGAACTGTTCAGGAAGTGTGATGGGATGAGCTGTGGCTGTCTCTGAAAAGGGCCTACCATA
TAACTTATTACTTTCAAGGATACCTTTGGCTCTTACTAAAATAGTTTATAAAGCATTTTATAGAAACACA
CCAGGGAATGCGTGGTGAACTACATGTATGATCAGTGAACTGTGACTAGAATTAACCTTAAAATCTCTTG
TATGTGGGGCCAGAGCAACACAGGTGGGAAACGCAGCGGACCTCTGCCTCCTCGGCCTCAACATGAACTT
GGCTTGCTTTCTCCACCGTCTCCAAATCTTTGTATAGTCATCGACCATTACCACCTCTCCTTTCCCATCT
ACTACAGCAGCCTTAATGGGGATAAGTACCCCCTTTTCTCAGGTGTCCGAATAAGCTGTGGGTGTGGCCT
GTGTTTCCTGTAATTCTGAGGTTAGATTGGAACATAAGCAAGCAGACAAACAAGCAGACAAACAAACAAG
GTTCTACTCATATTCCTAAGCAGTGACAGTGAAGGCATGTGTCTCCCATGCCTGAGTCTCCTAGGGTCCT
AGTGAGCTCTGGGTTCATGCAAGCACTTCCGGAGGAATTGCACCCTCCATGGAACACATAATCTCCACTG
GGTTGATCCTGATTGGATAAGAAAGGATCTCGGGGAGAGAATGTGGTTCCAGAGGCAAAGTGTCTAGGCT
ACACAGAAAAGGTAAGACTGTCCCCAAGGGAAGAAAACAAACTGGGAGCTGGGGTCCAGCTCAATTGTTA
AGAGTGCTTCTCTAGTATGCGTGAAGCCCAGAGTCCAATCTCAGTACCAGATACACGGTACAGGCAGTGA
CATATGCCTGTAATCCCAACCCTCAAGCAGTAGAGGCAAGAGGATCAGAAGTTCATGGTCATCCTTGACT
ACTTATACTTAGGGAGTTGGAGGTCAGCC
SEQ ID NO: 6
>reverse complement of SEQ ID NO: 5
GGCTGACCTCCAACTCCCTAAGTATAAGTAGTCAAGGATGACCATGAACTTCTGATCCTCTTGCCTCTACTGCTT
GAGGGTTGGGATTACAGGCATATGTCACTGCCTGTACCGTGTATCTGGTACTGAGATTGGACTCTGGGCTTCACG
CATACTAGAGAAGCACTCTTAACAATTGAGCTGGACCCCAGCTCCCAGTTTGTTTTCTTCCCTTGGGGACAGTCT
TACCTTTTCTGTGTAGCCTAGACACTTTGCCTCTGGAACCACATTCTCTCCCCGAGATCCTTTCTTATCCAATCA
GGATCAACCCAGTGGAGATTATGTGTTCCATGGAGGGTGCAATTCCTCCGGAAGTGCTTGCATGAACCCAGAGCT
CACTAGGACCCTAGGAGACTCAGGCATGGGAGACACATGCCTTCACTGTCACTGCTTAGGAATATGAGTAGAACC
TTGTTTGTTTGTCTGCTTGTTTGTCTGCTTGCTTATGTTCCAATCTAACCTCAGAATTACAGGAAACACAGGCCA
CACCCACAGCTTATTCGGACACCTGAGAAAAGGGGGTACTTATCCCCATTAAGGCTGCTGTAGTAGATGGGAAAG
GAGAGGTGGTAATGGTCGATGACTATACAAAGATTTGGAGACGGTGGAGAAAGCAAGCCAAGTTCATGTTGAGGC
CGAGGAGGCAGAGGTCCGCTGCGTTTCCCACCTGTGTTGCTCTGGCCCCACATACAAGAGATTTTAAGGTTAATT
CTAGTCACAGTTCACTGATCATACATGTAGITCACCACGCATTCCCTGGTGTGTTTCTATAAAATGCTTTATAAA
CTATTTTAGTAAGAGCCAAAGGTATCCTTGAAAGTAATAAGTTATATGGTAGGCCCTTTTCAGAGACAGCCACAG
CTCATCCCATCACACTTCCTGAACAGTTCTCCTTCCAAGATTGCACAAGATTGCCCGTTTGGATTGCCGTTTCCA
AACACTGAAGCCCTTGGAATCCCCATAGATCCACAGGCTGAGAGACGGTTTGACCGTTCTCTCTGCACTAACTCT
CAAGCACCAGACTTCACCCAGACCAAAAGTAGTTTTCTAAACACCAAATTATTGTCTTTGGTTTCTATGAACTAC
CTATTTAGCCCAGATCCTATGATCCTAGGGTCACAGGCAATGAGGTTACCACACAGCACCAAGGGGGCAGCTGCA
CAGGCTCAGCTCCTGGAGAGAAATTTCCTAGCTGCCTCCAAAAGTTAACAGAACCCTTCCCAGAGGGAAACAGAG
AGACAGCACCCCCCACCCACCTATCATCTAGACACTGTTGCTCTAGATAAAGGTCAAACTGGACTTGGGGTGGAA
GGCAGAGTGCCTTCAGCTATGGCCTCTCCTGGAACCATCCACAGGGAGAATGCCCAAGTTCATCGGAAGCACGGA
GACCAGCAATTTACAAACCGGCAGAGCTGCCTTGGGGTTTGTGGAGAGATGGGTGATATCCATGCTTGAGTGTTT
GATGGTTATCCTTGGATGCTCTGGATCTGGTAGAGGGGAGCAGGCACATGGTCATTCGGGCACACACCTGGGATG
TTGCCCACTGTAGCCACTGGATATCTTCATGGATATCAGGGAGCCACATCACCAGCCTGTGGACTGCAGCGATGG
CCGACTCCACGGGCAGAGTGCAGGGCAGCAAGATGTAGGACAGGATCCTAATGGGCAGGAGGTTGCAGACTTTGT
TCAGGTAGCCCCCCCTGTCTTTAATCGCTTCAGTCAGAGCTGTGCTGAGCTTGGGGGACAGCATCTCCCAGATGC
TCTCATCCGACGGCACAGCTGTAAGGCATACACAGCTTACTGGCACCTTGTTCCCTGCTACAAGGTGGCCATTTT
CCAAGCAGGGTATCATGGTTTCTGGCGCCATTTCCTTCTCCAAGGACAGACTCAGGCTGCGCTGTGGCCCATTAC
AGATGCCGTTCTCTTCCAGGAACCGGAAGGCGTCCAGGTACCCTTGAAAGCACAGCTCTCCCATCACCTTCACAT
CAGATGGGAAGAGTGCTCTGGTCAGAAGATGAAGGTTCCCAGTGCAGAGACGAAGACTGAGGTTGGTGATATTCA
CCTGGAGGAAGTTGGTGGACTTCACTTTGGGACAGATGTCATGCTCACCATAGAAAGGGGACACCGTGATGGTGG
TTTTGGCGTCCAGCACAGGGACGTTGTCACTCACTCCTCCATCCACGTACCGCTCACCTCGGAAGGAAGGAGGGA
TTAGGCCAGAGAAGAGAGGAATGAAGCAGGAGCACACCAGGGCATCCACCACTTCGTCTTTGGAATGGAACTCAG
ACACCAGCACGTTCTCCCCATCGGACACTCTGGTGAGTGAGATGTAAACCTTGCCAGAAATGATCTGGTGGACGT
TGTCTGGGAGGGTCTCCTGAAGGCCGTCTCTGACGCACTTGTTAATGTTGAAGAACGGGTGGAGGGTGCCGATGT
TGCGGCTCCTGGCTTTCCGCACGAGGTCCATGAGGATCTCCATGATGTGATCGAGAGGGAGACTGCACACGAAGG
TGACCGCGTGCAGTGCACCGGCCGAGCAGCCGAAGAAAGTGCGCGCTTCGCGGAGGATGTGCGGAGCGCGCTCGC
TCAGACATAGCGTAGCCCCGATGTGGTAGAAGCCTAGGAAGCCGCAGCCTGCGAACGACAGGCTCCAGCGGCGCT
CTGGGTCGTACATGGCGCTGGAGGCTCCGGAAGGCGATGCAGCTCAATTCTGCTCCGGG
SEQ ID NO: 7
>gi|544461323|ref|XM_005567051.1|PREDICTED: Macaca fascicularis patatin-
like phospholipase domain containing 3 (PNPLA3), transcript variant X1,
mRNA
TGCTGCGGATCAGGACCCGAGCCGATCCCCGATCCCGACTCCGATCCGGATCCGCGCCCCCGCCCCCGCC
CCGCCATGTACGACGCCGAGCGCGGCTGGAGCTTGTCCTTCGCGGGCTGCGGCTTCCTGGGCTTCTACCA
CGTCGGGGCGACCCGGTGCCTGAGCGAGCACGCCCCGCACCTCCTCCGCGACGCGCGCATGTTGTTCGGC
GCCTCGGCCGGGGCGTTGCACTGCGTCGGCGTCCTCTCCGGGATCCCGCTGGAGCAGACTCTGCAGGTCC
TCTCAGATCTTGTCCGGAAGGCCAGGAGTCGGAACATTGGTATCTTCCATCCATCCTTCAACATAGGCAA
GTTCCTCCGACAGGATCTCTACAAATACCTCCCGGCCAATGTCCACCAGCTCATCTCTGGCAAAATATGC
GTCTCACTCACCAGAGTGTCTGATGGGGAAAACGTTCTGGTGTCTGACTTTCAGTCCAAAGACGAAGTCG
TGGATGCCTTGATTTGTTCCTGCTTCATCCCTTTCTACAGTGGCCTTATCCCTCCTTCCTTCAGAGGCGT
GCGATATGTGGATGGAGGAGCGAGTGACAACGTACCCTTCATTGATGCCAAGACAACCATCACCGTGTCG
CCCTTCTATGGGGAGTACGACATCTGCCCTAAAGTCAAGTCCACCAACTTTCTTCATGTGGACATCACCA
AGCTCAGCCTACGCCTCTGCACAGGGAACCTCTACCTTCTCTCAAGAGCGTTTGTCCCCCCGGATCTCAA
GGTGCTGGGAGAGATATGCCTTCGAGGATATTTGGACGCGTTCAGGTTCTTGGAAGAGAAGGGCATCTGC
AACAAGCCCCAGCGGGGTCTGAAGTCATCCTCAGAAGGGATGGATTCTGAGGTCACTGCGCCCGGCTGGG
AAAACACAAGTCTGGATTCTTCCCCGGAGCCGGCTGCCTTGGCTATGAGGCTGGATGGAGATGAGCTGCT
AGACCACCTGCGTCTCAGCATCCTGCCCTGGGATGAGAGCATCCTGGACACCCTGTCGCCCGAGCTCGCT
ACAGCAGTGAGTGAAGCAATGAAAGACAAAGGTGGATACATGAGCAAGATTTGCAACTTGCTACCCATTA
GGATAATATCTTATGTGATGCTGCCCTGTACCCTGCCTGTGGAGTCTGCCATTGCGATTGTCCAGAGACT
GGTGACATGGCTTCCAGATATGCCCGACGATGTGCAGTGGCTGCAGTGGGTGACCTCACAGGTCTTCACT
CGAGCGCTGATGTGTCTGCTTCCCGCCTCCAGGTCCCAAATGCCAGTGAGCAGCGAACAGGCCTCCCCAT
GCAAACCGGAGCAGGACTGGCACTGCTGGACTCCCTGCTCCCCCGAGGACTGTCCTGCAGAGGCCAAAGC
AGAGGCTACCCCACGGTCCATCCTCAGGTCCAGCCTGAACTTCTTCTGGGGCAATAAAGTACCTGCTGGT
GCTGAGGGGCTCTCCACCTTTCCCAGTTTTTCACTGGAGAAGAATTTGTGAGTCATTTGAGGAGGCGAGT
CTAGGAGATTCTTTCAGAGGTGCTAAAGCTTCCCATCTTTGTGCAGCTACCTCCGCATTGCCGTGTAGTG
ACCCCTGCCTGTGACGTGGAGGATCCCAGCCTCTGAGCTGAGTTGGTTTTATGAAAAGCTAGGAAGCAAT
GTTTGGTCTGTGCAGCAGTCCAGCACTTAAGTCTAATACGTCAGCATGCGTTAGTTCAGCTGGTTGGGAA
ATGACACCGGGAAGCCTAGCGCAGAGGGTCCCTTACTGACTATTTCATGGTCCTATTAATGGTCAGACTG
TTCCAGTGTGAGGTTCTTAGAATGACTAGTGTTTGGATGGGTGGGGGCCTTGTGGTGGGGGGTGGGCTGG
CCTATGTGTGATCTTGTGGGGTGGAAGGAAGAGAGTAGCACAATCCCACCTCCCCATGCCGTGGGAAGGG
GTGCACTTGGTTCCCAAGAAGGACACTGCCTGTCAGGTGGCCTGCAAATATAATAACCTTGACAACTAAA
AACCTCTCCATGGGGGTGGGAGGTACCAAGATAATAACCGATTTACATTTTAGAGCACCTTTTTCACCTA
ACTAAAATAATGTTTAAAGAGTTTTATATAAAAATGTAAGGAAGAGTTGTTATCTGTTGAATTTTGTATT
ATATGAATCAGTGAGATGTTAATAGAATAAGCCTTTAAAAAGAAAAAAAGTTCAGCCAGGCGCTGTGGCA
CACGCCTGTAATCCCAGCACTTTGGAAGGCCGAGGTGGGCA
SEQ ID NO: 8
>reverse complement of SEQ ID NO: 7
TGCCCACCTCGGCCTTCCAAAGTGCTGGGATTACAGGCGTGTGCCACAGCGCCTGGCTGAACTTTTTTTCTTTTT
AAAGGCTTATTCTATTAACATCTCACTGATTCATATAATACAAAATTCAACAGATAACAACTCTTCCTTACATTT
TTATATAAAACTCTTTAAACATTATTTTAGTTAGGTGAAAAAGGTGCTCTAAAATGTAAATCGGTTATTATCTTG
GTACCTCCCACCCCCATGGAGAGGTTTTTAGTTGTCAAGGTTATTATATTTGCAGGCCACCTGACAGGCAGTGTC
CTTCTTGGGAACCAAGTGCACCCCTTCCCACGGCATGGGGAGGTGGGATTGTGCTACTCTCTTCCTTCCACCCCA
CAAGATCACACATAGGCCAGCCCACCCCCCACCACAAGGCCCCCACCCATCCAAACACTAGTCATTCTAAGAACC
TCACACTGGAACAGTCTGACCATTAATAGGACCATGAAATAGTCAGTAAGGGACCCTCTGCGCTAGGCTTCCCGG
TGTCATTTCCCAACCAGCTGAACTAACGCATGCTGACGTATTAGACTTAAGTGCTGGACTGCTGCACAGACCAAA
CATTGCTTCCTAGCTTTTCATAAAACCAACTCAGCTCAGAGGCTGGGATCCTCCACGTCACAGGCAGGGGTCACT
ACACGGCAATGCGGAGGTAGCTGCACAAAGATGGGAAGCTTTAGCACCTCTGAAAGAATCTCCTAGACTCGCCTC
CTCAAATGACTCACAAATTCTTCTCCAGTGAAAAACTGGGAAAGGTGGAGAGCCCCTCAGCACCAGCAGGTACTT
TATTGCCCCAGAAGAAGTTCAGGCTGGACCTGAGGATGGACCGTGGGGTAGCCTCTGCTTTGGCCTCTGCAGGAC
AGTCCTCGGGGGAGCAGGGAGTCCAGCAGTGCCAGTCCTGCTCCGGTTTGCATGGGGAGGCCTGTTCGCTGCTCA
CTGGCATTTGGGACCTGGAGGCGGGAAGCAGACACATCAGCGCTCGAGTGAAGACCTGTGAGGTCACCCACTGCA
GCCACTGCACATCGTCGGGCATATCTGGAAGCCATGTCACCAGTCTCTGGACAATCGCAATGGCAGACTCCACAG
GCAGGGTACAGGGCAGCATCACATAAGATATTATCCTAATGGGTAGCAAGTTGCAAATCTTGCTCATGTATCCAC
CTTTGTCTTTCATTGCTTCACTCACTGCTGTAGCGAGCTCGGGCGACAGGGTGTCCAGGATGCTCTCATCCCAGG
GCAGGATGCTGAGACGCAGGTGGTCTAGCAGCTCATCTCCATCCAGCCTCATAGCCAAGGCAGCCGGCTCCGGGG
AAGAATCCAGACTTGTGTTTTCCCAGCCGGGCGCAGTGACCTCAGAATCCATCCCTTCTGAGGATGACTTCAGAC
CCCGCTGGGGCTTGTTGCAGATGCCCTTCTCTTCCAAGAACCTGAACGCGTCCAAATATCCTCGAAGGCATATCT
CTCCCAGCACCTTGAGATCCGGGGGGACAAACGCTCTTGAGAGAAGGTAGAGGTTCCCTGTGCAGAGGCGTAGGC
TGAGCTTGGTGATGTCCACATGAAGAAAGTTGGTGGACTTGACTTTAGGGCAGATGTCGTACTCCCCATAGAAGG
GCGACACGGTGATGGTTGTCTTGGCATCAATGAAGGGTACGTTGTCACTCGCTCCTCCATCCACATATCGCACGC
CTCTGAAGGAAGGAGGGATAAGGCCACTGTAGAAAGGGATGAAGCAGGAACAAATCAAGGCATCCACGACTTCGT
CTTTGGACTGAAAGTCAGACACCAGAACGTTTTCCCCATCAGACACTCTGGTGAGTGAGACGCATATTTTGCCAG
AGATGAGCTGGTGGACATTGGCCGGGAGGTATTTGTAGAGATCCTGTCGGAGGAACTTGCCTATGTTGAAGGATG
GATGGAAGATACCAATGTTCCGACTCCTGGCCTTCCGGACAAGATCTGAGAGGACCTGCAGAGTCTGCTCCAGCG
GGATCCCGGAGAGGACGCCGACGCAGTGCAACGCCCCGGCCGAGGCGCCGAACAACATGCGCGCGTCGCGGAGGA
GGTGCGGGGCGTGCTCGCTCAGGCACCGGGTCGCCCCGACGTGGTAGAAGCCCAGGAAGCCGCAGCCCGCGAAGG
ACAAGCTCCAGCCGCGCTCGGCGTCGTACATGGCGGGGCGGGGGCGGGGGCGCGGATCCGGATCGGAGTCGGGAT
CGGGGATCGGCTCGGGTCCTGATCCGCAGCA
SEQ ID NO: 9
>gi|297261270|ref|XM_001109144.2|PREDICTED: Macaca mulatta patatin-like
phospholipase domain containing 3 (PNPLA3), mRNA
CGCTTGCGGGCGCCCGGCGGAGCTGCTGCGGATCAGGACCCGAGCCGATCCCCGATCCCGACTCCGATCC
GGATCCGCGCCCCCGCCCCCGCCCCGCCATGTACGACGCCGAGCGCGGCTGGAGCTTGTCCTTCGCGGGC
TGCGGCTTCCTGGGCTTCTACCACGTCGGGGCGACCCGCTGCCTGAGCGAGCACGCCCCGCACCTCCTCC
GCGACGCGCGCATGTTGTTCGGCGCCTCGGCCGGGGCGTTGCACTGCGTCGGCGTCCTCTCCGGGATCCC
GCTGGAGCAGACTCTGCAGGTCCTCTCAGATCTTGTCCGGAAGGCCAGGAGTCGGAACATTGGTATCTTC
CATCCATCCTTCAACATAGGCAAGTTCCTCCGACAGGATCTCTACAAATACCTCCCGGCCAATGTCCACC
AGCTCATCTCTGGCAAAATATGCGTCTCACTCACCAGAGTGTCTGATGGGGAAAACGTTCTGGTGTCTGA
CTTTCAGTCCAAAGACGAAGTCGTGGATGCCTTGATTTGTTCCTGCTTCATCCCTTTCTACAGTGGCCTT
ATCCCTCCTTCCTTCAGAGGCGTGCGATATGTGGATGGAGGAGCGAGTGACAACGTACCCTTCATTGATG
CCAAGACAACCATCACCGTGTCGCCCTTCTATGGGGAGTACGACATCTGCCCTAAAGTCAAGTCCACCAA
CTTTCTTCATGTGGACATCACCAAGCTCAGCCTACGCCTCTGCACAGGGAACCTCTACCTTCTCTCAAGA
GCGTTTGTCCCCCCGGATCTCAAGGTGCTGGGAGAGATATGCCTTCGAGGATATTTGGACGCGTTCAGGT
TCTTGGAAGAGAAGGGCATCTGCAACAAGCCCCAGCGGGGTCTGAAGTCATCCTCAGAAGGGATGGATTC
TGAGGTCACTGCGCCCGGCTGGGAAAACACAAGTCTGGATTCTTCCCCGGAGCCGGCTGCCTTGGCTATG
AGGCTGGATGGAGATGAGCTGCTAGACCACCTGCGTCTCAGCATCCTGCCCTGGGATGAGAGCATCCTGG
ACACCCTGTCGCCCGAGCTCGCTACAGCAGTGAGTGAAGCAATGAAAGACAAAGGTGGATACATGAGCAA
GATTTGCAACTTGCTACCCATTAGGATAATGTCTTATGTGATGCTGCCCTGTACCCTGCCTGTGGAGTCT
GCCATTGCGATTGTCCAGAGACTGGTGACATGGCTTCCGGATATGCCCGACGATGTGCAGTGGCTGCAGT
GGGTGACCTCACAGGTCTTCACTCGAGCGCTGATGTGTCTGCTTCCCGCCTCCAGGTCCCAAATGCCAGT
GAGCGGCGAACAGGCCTCCCCATGCAAACCGGAGCAGGACTGGCACTGCTGGACTCCCTGCTCCCCCGAG
GACTGTCCTGCAGAGGCCAAAGCAGAGGCTACCCCACGGTCCATCCTCAGGTCCAGCCTGAACTTCTTCT
GGGGCAATAAAGTACCTGCTGGTGCTGAGGGGCTCTCCACCTTTCCCAGTTTTTCACTGGAGAAGAATTT
GTGA
SEQ ID NO: 10
>reverse complement of SEQ ID NO: 9
TCACAAATTCTTCTCCAGTGAAAAACTGGGAAAGGTGGAGAGCCCCTCAGCACCAGCAGGTACTTTATTGCCCCA
GAAGAAGTTCAGGCTGGACCTGAGGATGGACCGTGGGGTAGCCTCTGCTTTGGCCTCTGCAGGACAGTCCTCGGG
GGAGCAGGGAGTCCAGCAGTGCCAGTCCTGCTCCGGTTTGCATGGGGAGGCCTGTTCGCCGCTCACTGGCATTTG
GGACCTGGAGGCGGGAAGCAGACACATCAGCGCTCGAGTGAAGACCTGTGAGGTCACCCACTGCAGCCACTGCAC
ATCGTCGGGCATATCCGGAAGCCATGTCACCAGTCTCTGGACAATCGCAATGGCAGACTCCACAGGCAGGGTACA
GGGCAGCATCACATAAGACATTATCCTAATGGGTAGCAAGTTGCAAATCTTGCTCATGTATCCACCTTTGTCTTT
CATTGCTTCACTCACTGCTGTAGCGAGCTCGGGCGACAGGGTGTCCAGGATGCTCTCATCCCAGGGCAGGATGCT
GAGACGCAGGTGGTCTAGCAGCTCATCTCCATCCAGCCTCATAGCCAAGGCAGCCGGCTCCGGGGAAGAATCCAG
ACTTGTGTTTTCCCAGCCGGGCGCAGTGACCTCAGAATCCATCCCTTCTGAGGATGACTTCAGACCCCGCTGGGG
CTTGTTGCAGATGCCCTTCTCTTCCAAGAACCTGAACGCGTCCAAATATCCTCGAAGGCATATCTCTCCCAGCAC
CTTGAGATCCGGGGGGACAAACGCTCTTGAGAGAAGGTAGAGGTTCCCTGTGCAGAGGCGTAGGCTGAGCTTGGT
GATGTCCACATGAAGAAAGTTGGTGGACTTGACTTTAGGGCAGATGTCGTACTCCCCATAGAAGGGCGACACGGT
GATGGTTGTCTTGGCATCAATGAAGGGTACGTTGTCACTCGCTCCTCCATCCACATATCGCACGCCTCTGAAGGA
AGGAGGGATAAGGCCACTGTAGAAAGGGATGAAGCAGGAACAAATCAAGGCATCCACGACTTCGTCTTTGGACTG
AAAGTCAGACACCAGAACGTTTTCCCCATCAGACACTCTGGTGAGTGAGACGCATATTTTGCCAGAGATGAGCTG
GTGGACATTGGCCGGGAGGTATTTGTAGAGATCCTGTCGGAGGAACTTGCCTATGTTGAAGGATGGATGGAAGAT
ACCAATGTTCCGACTCCTGGCCTTCCGGACAAGATCTGAGAGGACCTGCAGAGTCTGCTCCAGCGGGATCCCGGA
GAGGACGCCGACGCAGTGCAACGCCCCGGCCGAGGCGCCGAACAACATGCGCGCGTCGCGGAGGAGGTGCGGGGC
GTGCTCGCTCAGGCAGCGGGTCGCCCCGACGTGGTAGAAGCCCAGGAAGCCGCAGCCCGCGAAGGACAAGCTCCA
GCCGCGCTCGGCGTCGTACATGGGGGGGGGGGGCGGGGGCGCGGATCCGGATCGGAGTCGGGATCGGGGATCGG
CTCGGGTCCTGATCCGCAGCAGCTCCGCCGGGCGCCCGCAAGCG
SEQ ID NO: 11
>gi|544461325|ref|XM_005567052.1|PREDICTED: Macaca fascicularis patatin-
like phospholipase domain containing 3 (PNPLA3), transcript variant X2,
mRNA
GCTGCTGCGGATCAGGACCCGAGCCGATCCCCGATCCCGACTCCGATCCGGATCCGCGCCCCCGCCCCCG
CCCCGCCATGTACGACGCCGAGCGCGGCTGGAGCTTGTCCTTCGCGGGCTGCGGCTTCCTGGGCTTCTAC
CACGTCGGGGCGACCCGGTGCCTGAGCGAGCACGCCCCGCACCTCCTCCGCGACGCGCGCATGTTGTTCG
GCGCCTCGGCCGGGGCGTTGCACTGCGTCGGCGTCCTCTCCGGGATCCCGCTGGAGCAGACTCTGCAGGT
CCTCTCAGATCTTGTCCGGAAGGCCAGGAGTCGGAACATTGGTATCTTCCATCCATCCTTCAACATAGGC
AAGTTCCTCCGACAGGATCTCTACAAATACCTCCCGGCCAATGTCCACCAGCTCATCTCTGGCAAAATAT
GCGTCTCACTCACCAGAGTGTCTGATGGGGAAAACGTTCTGGTGTCTGACTTTCAGTCCAAAGACGAAGT
CGTGGATGCCTTGATTTGTTCCTGCTTCATCCCTTTCTACAGTGGCCTTATCCCTCCTTCCTTCAGAGGC
GTGCGATATGTGGATGGAGGAGCGAGTGACAACGTACCCTTCATTGATGCCAAGACAACCATCACCGTGT
CGCCCTTCTATGGGGAGTACGACATCTGCCCTAAAGTCAAGTCCACCAACTTTCTTCATGTGGACATCAC
CAAGCTCAGCCTACGCCTCTGCACAGGGAACCTCTACCTTCTCTCAAGAGCGTTTGTCCCCCCGGATCTC
AAGGTGCTGGGAGAGATATGCCTTCGAGGATATTTGGACGCGTTCAGGTTCTTGGAAGAGAAGGGCATCT
GCAACAAGCCCCAGCGGGGTCTGAAGTCATCCTCAGAAGGGATGGATTCTGAGGTCACTGCGCCCGGCTG
GGAAAACACAAGTCTGGATTCTTCCCCGGAGCCGGCTGCCTTGGCTATGAGGCTGGATGGAGATGAGCTG
CTAGACCACCTGCGTCTCAGCATCCTGCCCTGGGATGAGAGCATCCTGGACACCCTGTCGCCCGAGCTCG
CTACAGCAGTGAGTGAAGCAATGAAAGACAAAGGTGGATACATGAGCAAGATTTGCAACTTGCTACCCAT
TAGGATAATATCTTATGTGATGCTGCCCTGTACCCTGCCTGTGGAGTCTGCCATTGCGATTGTCCAGAGT
GTAAGTCCTTTGAGCTTTCTTGAACCAGAAGTGGCCTCATTTTGCTTTAGAGATTTCAGATGGGCTCATC
CTTGTCCTGTCATCCCAGATCCACCTGCTGGGAAGTCATCAGATTGGAGATGATGTTGGCGGCTTTTGTA
AACAAAGGGTGGTGTTGTAAGCTGTTGTGTCTGCCTGTGTGTGTGTTTGTGTACTTGGTCTTATCTCTGC
AGACTGGTGACATGGCTTCCAGATATGCCCGACGATGTGCAGTGGCTGCAGTGGGTGACCTCACAGGTCT
TCACTCGAGCGCTGATGTGTCTGCT
SEQ ID NO: 12
>reverse complement of SEQ ID NO: 11
AGCAGACACATCAGCGCTCGAGTGAAGACCTGTGAGGTCACCCACTGCAGCCACTGCACATCGTCGGGCATATCT
GGAAGCCATGTCACCAGTCTGCAGAGATAAGACCAAGTACACAAACACACACACAGGCAGACACAACAGCTTACA
ACACCACCCTTTGTTTACAAAAGCCGCCAACATCATCTCCAATCTGATGACTTCCCAGCAGGTGGATCTGGGATG
ACAGGACAAGGATGAGCCCATCTGAAATCTCTAAAGCAAAATGAGGCCACTTCTGGTTCAAGAAAGCTCAAAGGA
CTTACACTCTGGACAATCGCAATGGCAGACTCCACAGGCAGGGTACAGGGCAGCATCACATAAGATATTATCCTA
ATGGGTAGCAAGTTGCAAATCTTGCTCATGTATCCACCTTTGTCTTTCATTGCTTCACTCACTGCTGTAGCGAGC
TCGGGCGACAGGGTGTCCAGGATGCTCTCATCCCAGGGCAGGATGCTGAGACGCAGGTGGTCTAGCAGCTCATCT
CCATCCAGCCTCATAGCCAAGGCAGCCGGCTCCGGGGAAGAATCCAGACTTGTGTTTTCCCAGCCGGGCGCAGTG
ACCTCAGAATCCATCCCTTCTGAGGATGACTTCAGACCCCGCTGGGGCTTGTTGCAGATGCCCTTCTCTTCCAAG
AACCTGAACGCGTCCAAATATCCTCGAAGGCATATCTCTCCCAGCACCTTGAGATCCGGGGGGACAAACGCTCTT
GAGAGAAGGTAGAGGTTCCCTGTGCAGAGGCGTAGGCTGAGCTTGGTGATGTCCACATGAAGAAAGTTGGTGGAC
TTGACTTTAGGGCAGATGTCGTACTCCCCATAGAAGGGCGACACGGTGATGGTTGTCTTGGCATCAATGAAGGGT
ACGTTGTCACTCGCTCCTCCATCCACATATCGCACGCCTCTGAAGGAAGGAGGGATAAGGCCACTGTAGAAAGGG
ATGAAGCAGGAACAAATCAAGGCATCCACGACTTCGTCTTTGGACTGAAAGTCAGACACCAGAACGTTTTCCCCA
TCAGACACTCTGGTGAGTGAGACGCATATTTTGCCAGAGATGAGCTGGTGGACATTGGCCGGGAGGTATTTGTAG
AGATCCTGTCGGAGGAACTTGCCTATGTTGAAGGATGGATGGAAGATACCAATGTTCCGACTCCTGGCCTTCCGG
ACAAGATCTGAGAGGACCTGCAGAGTCTGCTCCAGCGGGATCCCGGAGAGGACGCCGACGCAGTGCAACGCCCCG
GCCGAGGCGCCGAACAACATGCGCGCGTCGCGGAGGAGGTGCGGGGCGTGCTCGCTCAGGCACCGGGTCGCCCCG
ACGTGGTAGAAGCCCAGGAAGCCGCAGCCCGCGAAGGACAAGCTCCAGCCGCGCTCGGCGTCGTACATGGCGGGG
CGGGGGCGGGGGCGCGGATCCGGATCGGAGTCGGGATCGGGGATCGGCTCGGGTCCTGATCCGCAGCAGC

### EQUIVALENTS

[0706] Those skilled in the art will recognize, or be able to ascertain using no more than routine experimentation, many equivalents to the specific embodiments and methods described herein. Such equivalents are intended to be encompassed by the scope of the following claims.

1. A double stranded ribonucleic acid (dsRNA) agent for inhibiting expression of Patatin-Like Phospholipase Domain Containing 3 (PNPLA3) in a cell,
a) wherein said dsRNA agent comprises a sense strand and an antisense strand forming a double stranded region,
wherein the antisense strand comprises a region of complementarity to an mRNA encoding PNPLA3, and wherein the region of complementarity comprises at least 15 contiguous nucleotides differing by no more than 3 nucleotides from any one of the antisense nucleotide sequences in any one of Tables 2, 3, 6, and 7;
b) wherein said dsRNA agent comprises a sense strand and an antisense strand forming a double stranded region,
wherein the sense strand comprises at least 15 contiguous nucleotides differing by no more than three nucleotides from any one of the nucleotide sequence of nucleotides 187-209; 214-238; 219-245; 283-305; 351-379; 361-391; 395-419; 416-439; 472-494; 483-506; 570-598; 618-649; 631-654; 636-659; 640-662; 643-677; 676-710; 740-772; 782-805; 803-825; 810-842; 864-905; 905-927; 910-934; 919-942; 953-983; 1062-1087; 1069-1097; 1078-1108; 1094-112; 1164-1187; 1170-1199; 1180-1212; 1196-1224; 1234-1262; 1259-1297; 1278-1318; 1326-1351; 1382-1411; 1518-1545; 1543-1568; 1549-1574; 1575-1597; 1621-1643; 1644-1692; 1676-1700; 1712-1734; 1719-1745; 1733-1778; 1733-1760; 1739-1770; 1749-1778; 1829-1856; 1865-1890; 1900-1925; 2076-2098; 2121-2148; 2175-2208; or 2243-2265 of SEQ ID NO: 1, and the antisense strand comprises at least 15 contiguous nucleotides from the corresponding nucleotide sequence of SEQ ID NO:2; or
c) wherein said dsRNA agent comprises a sense strand and an antisense strand forming a double stranded region,
wherein the sense strand comprises at least 15 contiguous nucleotides differing by no more than three nucleotides from any one of the nucleotide sequence of nucleotides 687-709, 1182-1204, 1201-1223, 1738-1760, or 2186-2208 of SEQ ID NO: 1, and the antisense strand comprises at least 15 contiguous nucleotides from the corresponding nucleotide sequence of SEQ ID NO:2.

2. (canceled)

3. (canceled)

4. The dsRNA agent of claim 1,
a) wherein the antisense strand comprises at least 15 contiguous nucleotides differing by no more than three nucleotides from any one of the antisense strand nucleotide sequences of an agent selected from the group consisting of AD-1526902.2, AD-1526891.3, AD-1526820.3, AD-1526960.2, and AD-1526996.2, or
b) the sense and the antisense strand comprise at least 15 contiguous nucleotides differing by no more than three nucleotides from any one of the sense and the antisense strand nucleotide sequences of an agent selected from the group consisting of AD-1526902.2, AD-1526891.3, AD-1526820.3, and AD-1526960.2.

5.-14. (canceled)

15. The dsRNA agent of claim 1, wherein all of the nucleotides of the sense strand and all of the nucleotides of the antisense strand comprise a nucleotide modification.

16. The dsRNA agent of claim 15, wherein at least one of the nucleotide modifications is selected from the group consisting of a deoxy-nucleotide modification, a 3′-terminal deoxy-thymine (dT) nucleotide modification, a 2′-O-methyl nucleotide modification, a 2′-fluoro nucleotide modification, a 2′-deoxy-nucleotide modification, a locked nucleotide modification, an unlocked nucleotide modification, a conformationally restricted nucleotide modification, a constrained ethyl nucleotide modification, an abasic nucleotide modification, a 2′-amino-nucleotide modification, a 2′-O-allyl-nucleotide modification, 2′-C-alkyl-nucleotide modification, 2′-hydroxly-nucleotide modification, a 2′-methoxyethyl nucleotide modification, a 2′-O-alkyl-nucleotide modification, a morpholino nucleotide modification, a phosphoramidate nucleotide modification, a non-natural base comprising nucleotide modification, a tetrahydropyran nucleotide modification, a 1,5-anhydrohexitol nucleotide modification, a cyclohexenyl nucleotide modification, a nucleotide comprising a phosphorothioate group modification, a nucleotide comprising a methylphosphonate group modification, a nucleotide comprising a 5′-phosphate modification, a nucleotide comprising a 5′-phosphate mimic modification, a thermally destabilizing nucleotide modification, a glycol nucleotide (GNA) modification, a nucleotide comprising a 2′ phosphate modification, and a 2-O—(N-methylacetamide) nucleotide modification; and combinations thereof.

17.-20. (canceled)

21. The dsRNA agent of claim 1, wherein the double stranded region is 19-30 nucleotide pairs in length.

22.-25. (canceled)

26. The dsRNA agent of claim 1, wherein each strand is independently no more than 30 nucleotides in length.

27.-30. (canceled)

31. The dsRNA agent of claim 1, wherein at least one strand comprises a 3′ overhang of at least 1 nucleotide.

32. (canceled)

33. The dsRNA agent of claim 1, further comprising a ligand.

34. The dsRNA agent of claim 33, wherein the ligand is conjugated to the 3′ end of the sense strand of the dsRNA agent.

35. The dsRNA agent of claim 33, wherein the ligand comprises an N-acetylgalactosamine (GalNAc) derivative.

36. The dsRNA agent of claim 33, wherein the ligand comprises one or more GalNAc derivatives attached through a monovalent, bivalent, or trivalent branched linker.

37. The dsRNA agent of claim 35, wherein the ligand comprises

[chemical structure]

38. The dsRNA agent of claim 37, wherein the dsRNA agent is conjugated to the ligand as shown in the following schematic [chemical structure]
and, wherein X is O or S.

39. The dsRNA agent of claim 38, wherein the X is O.

40. The dsRNA agent of claim 1, wherein the dsRNA agent comprises at least one phosphorothioate or methylphosphonate internucleotide linkage.

41.-49. (canceled)

50. A cell containing the dsRNA agent of claim 1.

51. A pharmaceutical composition for inhibiting expression of a gene encoding Patatin-Like Phospholipase Domain Containing 3 (PNPLA3) comprising the dsRNA agent of claim 1.

52.-56. (canceled)

57. A method of inhibiting expression of a Patatin-Like Phospholipase Domain Containing 3 (PNPLA3) gene in a cell, the method comprising contacting the cell with the dsRNA agent of claim 1, thereby inhibiting expression of the PNPLA3 gene in the cell.

58.-63. (canceled)

64. A method of treating a subject having a disorder that would benefit from reduction in Patatin-Like Phospholipase Domain Containing 3 (PNPLA3) expression, comprising administering to the subject a therapeutically effective amount of the dsRNA agent of claim 1, thereby treating the subject having the disorder that would benefit from reduction in PNPLA3 expression.

65. (canceled)

66. The method of claim 64, wherein the disorder is a PNPLA3-associated disorder.

67.-75. (canceled)

76. A kit, a vial, or a syringe comprising the dsRNA agent of claim 1.

The application's sequence listing, which the Patent Office published only in electronic form, follows.

SEQUENCE LISTING (1759 sequences)

SEQ ID NO: 1 - DNA, 2805 bp, Homo sapiens
  source 1..2805: mol_type = genomic DNA
atggtccgaggggggcggggctgacgtcgcgctgggaatgccctggccgagacactgaggcagggtagagagcgcttgcgggcgccgggcggagctgctgcggatcaggacccgagccgattcccgatcccgacccagatcctaacccgcgcccccgccccgccgccgccgccatgtacgacgcagagcgcggctggagcttgtccttcgcgggctgcggcttcctgggcttctaccacgtcggggcgacccgctgcctgagcgagcacgccccgcacctcctccgcgacgcgcgcatgttgttcggcgcttcggccggggcgttgcactgcgtcggcgtcctctccggtatcccgctggagcagactctgcaggtcctctcagatcttgtgcggaaggccaggagtcggaacattggcatcttccatccatccttcaacttaagcaagttcctccgacagggtctctgcaaatgcctcccggccaatgtccaccagctcatctccggcaaaataggcatctctcttaccagagtgtctgatggggaaaacgttctggtgtctgactttcggtccaaagacgaagtcgtggatgccttggtatgttcctgcttcatccccttctacagtggccttatccctccttccttcagaggcgtgcgatatgtggatggaggagtgagtgacaacgtacccttcattgatgccaaaacaaccatcaccgtgtcccccttctatggggagtacgacatctgccctaaagtcaagtccacgaactttcttcatgtggacatcaccaagctcagtctacgcctctgcacagggaacctctaccttctctcgagagcttttgtccccccggatctcaaggtgctgggagagatatgccttcgaggatatttggatgcattcaggttcttggaagagaagggcatctgcaacaggccccagccaggcctgaagtcatcctcagaagggatggatcctgaggtcgccatgcccagctgggcaaacatgagtctggattcttccccggagtcggctgccttggctgtgaggctggagggagatgagctgctagaccacctgcgtctcagcatcctgccctgggatgagagcatcctggacaccctctcgcccaggctcgctacagcactgagtgaagaaatgaaagacaaaggtggatacatgagcaagatttgcaacttgctacccattaggataatgtcttatgtaatgctgccctgtaccctgcctgtggaatctgccattgcgattgtccagagactggtgacatggcttccagatatgcccgacgatgtcctgtggttgcagtgggtgacctcacaggtgttcactcgagtgctgatgtgtctgctccccgcctccaggtcccaaatgccagtgagcagccaacaggcctccccatgcacacctgagcaggactggccctgctggactccctgctcccccaagggctgtccagcagagaccaaagcagaggccaccccgcggtccatcctcaggtccagcctgaacttcttcttgggcaataaagtacctgctggtgctgaggggctctccacctttcccagtttttcactagagaagagtctgtgagtcacttgaggaggcgagtctagcagattctttcagaggtgctaaagtttcccatctttgtgcagctacctccgcattgctgtgtagtgacccctgcctgtgacgtggaggatcccagcctctgagctgagttggttttatgaaaagctaggaagcaacctttcgcctgtgcagcggtccagcacttaactctaatacatcagcatgcgttaattcagctggttgggaaatgacaccaggaagcccagtgcagagggtcccttactgactgtttcgtggccctattaatggtcagactgttccagcatgaggttcttagaatgacaggtgtttggatgggtgggggccttgtgatggggggtaggctggcccatgtgtgatcttgtggggtggagggaagagaatagcatgatcccacttccccatgctgtgggaaggggtgcagttcgtccccaagaacgacactgcctgtcaggtggtctgcaaagatgataaccttgactactaaaaacgtctccatggcgggggtaacaagatgataatctacttaattttagaacacctttttcacctaactaaaataatgtttaaagagttttgtataaaaatgtaaggaagcgttgttacctgttgaattttgtattatgtgaatcagtgagatgttagtagaataagccttaaaaaaaaaaaaatcggttgggtgcagtggcacacggctgtaatcccagcactttgggaggccaaggttggcagatcacctgaggtcaggagttcaagaccagtctggccaacatagcaaaaccctgtctctactaaaaatacaaaaattatctgggcatggtggtgcatgcctgtaatcccagctattcggaaggctgaggcaggagaatcacttgaacccaggaggcggaggttgcggtgagctgagattgcaccatttcattccagcctgggcaacatgagtgaaagtctgactcaaaaaaaaaaaatttaaaaaacaaaataatctagtgtgcagggcattcacctcagccccccaggcaggagccaagcacagcaggagcttccgcctcctctccactggagcacacaacttgaacctggcttattttctgcagggaccagccccacatggtcagtgagtttctccccatgtgtggcgatgagagagtgtagaaataaagac

SEQ ID NO: 2 - DNA, 2805 bp, Homo sapiens
  source 1..2805: mol_type = genomic DNA
gtctttatttctacactctctcatcgccacacatggggagaaactcactgaccatgtggggctggtccctgcagaaaataagccaggttcaagttgtgtgctccagtggagaggaggcggaagctcctgctgtgcttggctcctgcctggggggctgaggtgaatgccctgcacactagattattttgttttttaaattttttttttttgagtcagactttcactcatgttgcccaggctggaatgaaatggtgcaatctcagctcaccgcaacctccgcctcctgggttcaagtgattctcctgcctcagccttccgaatagctgggattacaggcatgcaccaccatgcccagataatttttgtatttttagtagagacagggttttgctatgttggccagactggtcttgaactcctgacctcaggtgatctgccaaccttggcctcccaaagtgctgggattacagccgtgtgccactgcacccaaccgatttttttttttttaaggcttattctactaacatctcactgattcacataatacaaaattcaacaggtaacaacgcttccttacatttttatacaaaactctttaaacattattttagttaggtgaaaaaggtgttctaaaattaagtagattatcatcttgttacccccgccatggagacgtttttagtagtcaaggttatcatctttgcagaccacctgacaggcagtgtcgttcttggggacgaactgcaccccttcccacagcatggggaagtgggatcatgctattctcttccctccaccccacaagatcacacatgggccagcctaccccccatcacaaggcccccacccatccaaacacctgtcattctaagaacctcatgctggaacagtctgaccattaatagggccacgaaacagtcagtaagggaccctctgcactgggcttcctggtgtcatttcccaaccagctgaattaacgcatgctgatgtattagagttaagtgctggaccgctgcacaggcgaaaggttgcttcctagcttttcataaaaccaactcagctcagaggctgggatcctccacgtcacaggcaggggtcactacacagcaatgcggaggtagctgcacaaagatgggaaactttagcacctctgaaagaatctgctagactcgcctcctcaagtgactcacagactcttctctagtgaaaaactgggaaaggtggagagcccctcagcaccagcaggtactttattgcccaagaagaagttcaggctggacctgaggatggaccgcggggtggcctctgctttggtctctgctggacagcccttgggggagcagggagtccagcagggccagtcctgctcaggtgtgcatggggaggcctgttggctgctcactggcatttgggacctggaggcggggagcagacacatcagcactcgagtgaacacctgtgaggtcacccactgcaaccacaggacatcgtcgggcatatctggaagccatgtcaccagtctctggacaatcgcaatggcagattccacaggcagggtacagggcagcattacataagacattatcctaatgggtagcaagttgcaaatcttgctcatgtatccacctttgtctttcatttcttcactcagtgctgtagcgagcctgggcgagagggtgtccaggatgctctcatcccagggcaggatgctgagacgcaggtggtctagcagctcatctccctccagcctcacagccaaggcagccgactccggggaagaatccagactcatgtttgcccagctgggcatggcgacctcaggatccatcccttctgaggatgacttcaggcctggctggggcctgttgcagatgcccttctcttccaagaacctgaatgcatccaaatatcctcgaaggcatatctctcccagcaccttgagatccggggggacaaaagctctcgagagaaggtagaggttccctgtgcagaggcgtagactgagcttggtgatgtccacatgaagaaagttcgtggacttgactttagggcagatgtcgtactccccatagaagggggacacggtgatggttgttttggcatcaatgaagggtacgttgtcactcactcctccatccacatatcgcacgcctctgaaggaaggagggataaggccactgtagaaggggatgaagcaggaacataccaaggcatccacgacttcgtctttggaccgaaagtcagacaccagaacgttttccccatcagacactctggtaagagagatgcctattttgccggagatgagctggtggacattggccgggaggcatttgcagagaccctgtcggaggaacttgcttaagttgaaggatggatggaagatgccaatgttccgactcctggccttccgcacaagatctgagaggacctgcagagtctgctccagcgggataccggagaggacgccgacgcagtgcaacgccccggccgaagcgccgaacaacatgcgcgcgtcgcggaggaggtgcggggcgtgctcgctcaggcagcgggtcgccccgacgtggtagaagcccaggaagccgcagcccgcgaaggacaagctccagccgcgctctgcgtcgtacatggcggcggcggcggggcgggggcgcgggttaggatctgggtcgggatcgggaatcggctcgggtcctgatccgcagcagctccgcccggcgcccgcaagcgctctctaccctgcctcagtgtctcggccagggcattcccagcgcgacgtcagccccgcccccctcggaccat

SEQ ID NO: 3 - DNA, 4649 bp, Mus musculus
  source 1..4649: mol_type = genomic DNA
agagcagcaacaccgggagcagagctgaactgcagcgccgcccggagcttcaagcaccatgtatgacccagagcgccgctggagcctgtcgtttgcaggctgcggcttcctgggcttctaccacgtcggggctacgctatgtctgagcgagcgcgccccgcacctcctccgcgatgcgcgcactttctttggctgctcggccggtgcactgcacgcggtcaccttcgtgtgcagtctccctctcggccgtataatggagatcctcatggacctcgtgcggaaagccaggagccgcaacatcggcaccctccacccgttcttcaacattaacaagtgcatcagagacgggctccaggagagcctcccagacaatgtccaccaggtcatttctggcaaggttcacatctcactcaccagggtgtcggatggggagaacgtgctggtgtctgagttccattccaaagacgaagtcgtggatgccctggtgtgttcctgcttcattcccctcttctctggcctaatccctccttccttccgaggcgagcggtacgtggacggaggagtgagcgacaacgtccctgtgctggatgccaaaaccaccatcacggtgtcacctttctacggtgagcatgacatctgccccaaagtcaagtccaccaacttcttccacgtgaatatcaccaacctcagcctccgcctctgcactgggaacctccaacttctgaccagagcgctcttcccgtctgatgtgaaggtgatgggagagctgtgctatcaagggtacctggacgccttccggttcctggaggagaatggcatctgtaacgggccacagcgcagcctgagtctgtccttggtggcgccagaagcctgcttggaaaatggcaaacttgtgggagacaaggtgccagtcagcctatgctttacagatgagaacatctgggagacactgtcccccgagctcagcacagctctgagtgaagcgattaaggacagggagggctacctgagcaaagtctgcaacctcctgcccgtcaggatcctgtcctacatcatgctgccctgcagtctgcccgtggagtcggctatcgctgcagtccacaggctggtgacatggctccctgatatccaggatgatatccagtggctacaatgggcgacatcccaggtttgtgcccgaatgacgatgtgcctgctcccctctaccaggtaaatacttgggcccagggtgtgtgggccagataggcatccctcccggttgttcccagagctcttagggtcagagcttgggtggtgacagccttaacaagccaggctcagccgcctgtccccagcatgccattaaagaaaccggtagcagagaaagcaggtttattcgaatataaaaaggttcaagcccccacccggttaatctttaagataccaacaggaggcttaagtttaaacagagttacacataaacagtctgaatcagggcgtggtcctgcccaccattgtctgggcttcaaggttccttctttctctccctagcatgagattcctgggacaatcccaattccttggcctccattgtatcaaagggctgaaaaccaaagggaaggcacagctgtctcttcagcatgcctcttctgccagaaccactgcaaggtttggtgctcaggctgtgcaaacattctagcaatgtttgactcagtgtcaagcaggtgacaaggaacatggtgctgtgtggggggaacccatggcccaggtgagggcttattggtgggtgaagctgtgggtgttcaggtggtggagaaggccttaagggatgggactgacacctcagcactgaaggcaggaggaagctgtggctctgggttgcacccctgcctggctccaccctctctggcatctgtagaagttacagctggttcttcctctcagccccatgctcccagaaataagactcagacccaaattatagttacaaataccttggccatatagctaggctcttctcagactagctcataacttaactcattaattttaacctccatcctgccacatggctggtggcctgtgctcaggtaccatgagtccagctcttcacatctttccggatgaatcttccataattctttctgcctcctggatgttccaccttctattccaccttttcctataggccatggttttgtttttgttttttttttccaaatttaatttaattaattaatttatttatttttggtttttcgagacagggtttctctgtatcgccctggctgtcctggaactcactatgtaagccaggctggcctcaaactcagaaatccgcctgcctctgcctcctgagtgctgggattaaaggcgtgcgcaaccatgcccggtgtggtttttttttttttttaattgacaggtggatgcatctatataatccataacatattctctctacaggtatctattaggttttgggtgaggtgtggagttctagggaactctgagagaaattcctggggagtaagtggtttatcaagttgattggaggagtttttaatgctatggacagacagacagaaggacaacagcatagtcggggctaccagggagttcaggccccggcatcggagatagaagcaggatggggtctttgaagagattctgagcccacacagcagaggagggactctctctttagagcttttgaggatgagggaggttgactgcaagagcctacagccaggctcgaggcaggcagggggtggggagcaggatgtaaaccccttcgatgctgacagactcacttctggggtaaaatattatgagatgcctgtcagtgtctgtgaagagacctgagcagagtctggattctgacatcaatcatgttcttacaatactgaagacctgagagcctgcaatcttggtttgtaaattgctggtctccgtgcttccagtgaacttggacattcttctcatggttggtccaggagaggccaaagctgagggcaccctgccttccacccccagtccagcttgaccttttatctggagcaacagtgtctagatgatgggtgggtgaggggtgctatactgtctgtccctctgggaagggttctgttacttttggaggcagctaggaagtttctctgtgcagctgccccctggtgctgtgtggtgacctcattgcctgtgaccccaggatcacaggatctgggctaaagtggtagtccatagaaaccaaagacaatgatttggtgtttagaaagctactcttggtctgggtgaagtctggtgcttaagggctatcacaaagagcgtgtcaaaccatctctcagcctgtgagtcagtggggagcccaagggcatcagtgtttggaaactggaatccaaaccgggcaatctcggaaggaaactgtttaggaattgtgatgggacgggccgtggctgtctctgaaaagggcctgccagataacttattacttttaaggacacctttggctcttactaatttataaagcattttatataaacacaccagggagtgcatggtgaactacacgtatgatcagttaagtggggctagaattaggtagggagagcatcggacctctgcctcctcaacctcaacttgcttgctttctccactggctccaaatctttgtatagtcatcagccatgaccacctctctccctccccatctactaccagcagcgttaatgggaataagtacccacttctctcaggtgtactatacagctgtgggtgtggtgtgtgtttcctgtaattcacactttagaaaggaaacaagcaaacaaaagaaaccaggtgctgcccatactcctaagtgtagacagtgaaggtgtgtgtctcccatgcctgagtctcctggaggcctagtgagctccaggttcatgcaagcacatcaggaggaatcatataatctcagcacggttgatccagatgggataagaaaggactctgggagagagaatgtggttctagagacaaagtgtctaggctacacagaagataagactgtcccaaggaaagaaaagaaaccaggaactagggtgcagctcagttgtcagaggacttctctaggcttgaagcccagagtccaatctcagcaccttataaactgtggagtgacaggcagtgacatcggcctgtaatcccaacactcaagcagtagaggcaagaggatcataagttcaaggtcttccttggctatttagggagttggaggttagctctggctacatgagaccctgtctcaaaaaaaaaaaaaaaaaaaagtagaaacttctgccttgctttgagctgcccctttctggacgtttctcatcagtagagaatattcctgccaccctatcagacaaaactcccactggtttggagtctctccattctcaggaacacctcaggagtcagacagtgagcagcagggagcaatgtcttgacttgtaagccccttagcaaggctggttcatttgtttattaaaagcaggtgtgggtgaatttatgcaaatgagtatgcaaactagtggaacagcagaaggattgaatggatacaccaaaaataaccacaactgtttaagggaaaagggtccataataaatgtggggaacaaaaaacaaataaatgtgattttttttagaaaaatg

SEQ ID NO: 4 - DNA, 4649 bp, Mus musculus
  source 1..4649: mol_type = genomic DNA
catttttctaaaaaaaatcacatttatttgttttttgttccccacatttattatggacccttttcccttaaacagttgtggttatttttggtgtatccattcaatccttctgctgttccactagtttgcatactcatttgcataaattcacccacacctgcttttaataaacaaatgaaccagccttgctaaggggcttacaagtcaagacattgctccctgctgctcactgtctgactcctgaggtgttcctgagaatggagagactccaaaccagtgggagttttgtctgatagggtggcaggaatattctctactgatgagaaacgtccagaaaggggcagctcaaagcaaggcagaagtttctacttttttttttttttttttttgagacagggtctcatgtagccagagctaacctccaactccctaaatagccaaggaagaccttgaacttatgatcctcttgcctctactgcttgagtgttgggattacaggccgatgtcactgcctgtcactccacagtttataaggtgctgagattggactctgggcttcaagcctagagaagtcctctgacaactgagctgcaccctagttcctggtttcttttctttccttgggacagtcttatcttctgtgtagcctagacactttgtctctagaaccacattctctctcccagagtcctttcttatcccatctggatcaaccgtgctgagattatatgattcctcctgatgtgcttgcatgaacctggagctcactaggcctccaggagactcaggcatgggagacacacaccttcactgtctacacttaggagtatgggcagcacctggtttcttttgtttgcttgtttcctttctaaagtgtgaattacaggaaacacacaccacacccacagctgtatagtacacctgagagaagtgggtacttattcccattaacgctgctggtagtagatggggagggagagaggtggtcatggctgatgactatacaaagatttggagccagtggagaaagcaagcaagttgaggttgaggaggcagaggtccgatgctctccctacctaattctagccccacttaactgatcatacgtgtagttcaccatgcactccctggtgtgtttatataaaatgctttataaattagtaagagccaaaggtgtccttaaaagtaataagttatctggcaggcccttttcagagacagccacggcccgtcccatcacaattcctaaacagtttccttccgagattgcccggtttggattccagtttccaaacactgatgcccttgggctccccactgactcacaggctgagagatggtttgacacgctctttgtgatagcccttaagcaccagacttcacccagaccaagagtagctttctaaacaccaaatcattgtctttggtttctatggactaccactttagcccagatcctgtgatcctggggtcacaggcaatgaggtcaccacacagcaccagggggcagctgcacagagaaacttcctagctgcctccaaaagtaacagaacccttcccagagggacagacagtatagcacccctcacccacccatcatctagacactgttgctccagataaaaggtcaagctggactgggggtggaaggcagggtgccctcagctttggcctctcctggaccaaccatgagaagaatgtccaagttcactggaagcacggagaccagcaatttacaaaccaagattgcaggctctcaggtcttcagtattgtaagaacatgattgatgtcagaatccagactctgctcaggtctcttcacagacactgacaggcatctcataatattttaccccagaagtgagtctgtcagcatcgaaggggtttacatcctgctccccaccccctgcctgcctcgagcctggctgtaggctcttgcagtcaacctccctcatcctcaaaagctctaaagagagagtccctcctctgctgtgtgggctcagaatctcttcaaagaccccatcctgcttctatctccgatgccggggcctgaactccctggtagccccgactatgctgttgtccttctgtctgtctgtccatagcattaaaaactcctccaatcaacttgataaaccacttactccccaggaatttctctcagagttccctagaactccacacctcacccaaaacctaatagatacctgtagagagaatatgttatggattatatagatgcatccacctgtcaattaaaaaaaaaaaaaaaccacaccgggcatggttgcgcacgcctttaatcccagcactcaggaggcagaggcaggcggatttctgagtttgaggccagcctggcttacatagtgagttccaggacagccagggcgatacagagaaaccctgtctcgaaaaaccaaaaataaataaattaattaattaaattaaatttggaaaaaaaaaacaaaaacaaaaccatggcctataggaaaaggtggaatagaaggtggaacatccaggaggcagaaagaattatggaagattcatccggaaagatgtgaagagctggactcatggtacctgagcacaggccaccagccatgtggcaggatggaggttaaaattaatgagttaagttatgagctagtctgagaagagcctagctatatggccaaggtatttgtaactataatttgggtctgagtcttatttctgggagcatggggctgagaggaagaaccagctgtaacttctacagatgccagagagggtggagccaggcaggggtgcaacccagagccacagcttcctcctgccttcagtgctgaggtgtcagtcccatcccttaaggccttctccaccacctgaacacccacagcttcacccaccaataagccctcacctgggccatgggttccccccacacagcaccatgttccttgtcacctgcttgacactgagtcaaacattgctagaatgtttgcacagcctgagcaccaaaccttgcagtggttctggcagaagaggcatgctgaagagacagctgtgccttccctttggttttcagccctttgatacaatggaggccaaggaattgggattgtcccaggaatctcatgctagggagagaaagaaggaaccttgaagcccagacaatggtgggcaggaccacgccctgattcagactgtttatgtgtaactctgtttaaacttaagcctcctgttggtatcttaaagattaaccgggtgggggcttgaacctttttatattcgaataaacctgctttctctgctaccggtttctttaatggcatgctggggacaggcggctgagcctggcttgttaaggctgtcaccacccaagctctgaccctaagagctctgggaacaaccgggagggatgcctatctggcccacacaccctgggcccaagtatttacctggtagaggggagcaggcacatcgtcattcgggcacaaacctgggatgtcgcccattgtagccactggatatcatcctggatatcagggagccatgtcaccagcctgtggactgcagcgatagccgactccacgggcagactgcagggcagcatgatgtaggacaggatcctgacgggcaggaggttgcagactttgctcaggtagccctccctgtccttaatcgcttcactcagagctgtgctgagctcgggggacagtgtctcccagatgttctcatctgtaaagcataggctgactggcaccttgtctcccacaagtttgccattttccaagcaggcttctggcgccaccaaggacagactcaggctgcgctgtggcccgttacagatgccattctcctccaggaaccggaaggcgtccaggtacccttgatagcacagctctcccatcaccttcacatcagacgggaagagcgctctggtcagaagttggaggttcccagtgcagaggcggaggctgaggttggtgatattcacgtggaagaagttggtggacttgactttggggcagatgtcatgctcaccgtagaaaggtgacaccgtgatggtggttttggcatccagcacagggacgttgtcgctcactcctccgtccacgtaccgctcgcctcggaaggaaggagggattaggccagagaagaggggaatgaagcaggaacacaccagggcatccacgacttcgtctttggaatggaactcagacaccagcacgttctccccatccgacaccctggtgagtgagatgtgaaccttgccagaaatgacctggtggacattgtctgggaggctctcctggagcccgtctctgatgcacttgttaatgttgaagaacgggtggagggtgccgatgttgcggctcctggctttccgcacgaggtccatgaggatctccattatacggccgagagggagactgcacacgaaggtgaccgcgtgcagtgcaccggccgagcagccaaagaaagtgcgcgcatcgcggaggaggtgcggggcgcgctcgctcagacatagcgtagccccgacgtggtagaagcccaggaagccgcagcctgcaaacgacaggctccagcggcgctctgggtcatacatggtgcttgaagctccgggcggcgctgcagttcagctctgctcccggtgttgctgctct

SEQ ID NO: 5 - DNA, 2759 bp, Rattus norvegicus
  source 1..2759: mol_type = genomic DNA
cccggagcagaattgagctgcatcgccttccggagcctccagcgccatgtacgacccagagcgccgctggagcctgtcgttcgcaggctgcggcttcctaggcttctaccacatcggggctacgctatgtctgagcgagcgcgctccgcacatcctccgcgaagcgcgcactttcttcggctgctcggccggtgcactgcacgcggtcaccttcgtgtgcagtctccctctcgatcacatcatggagatcctcatggacctcgtgcggaaagccaggagccgcaacatcggcaccctccacccgttcttcaacattaacaagtgcgtcagagacggccttcaggagaccctcccagacaacgtccaccagatcatttctggcaaggtttacatctcactcaccagagtgtccgatggggagaacgtgctggtgtctgagttccattccaaagacgaagtggtggatgccctggtgtgctcctgcttcattcctctcttctctggcctaatccctccttccttccgaggtgagcggtacgtggatggaggagtgagtgacaacgtccctgtgctggacgccaaaaccaccatcacggtgtcccctttctatggtgagcatgacatctgtcccaaagtgaagtccaccaacttcctccaggtgaatatcaccaacctcagtcttcgtctctgcactgggaaccttcatcttctgaccagagcactcttcccatctgatgtgaaggtgatgggagagctgtgctttcaagggtacctggacgccttccggttcctggaagagaacggcatctgtaatgggccacagcgcagcctgagtctgtccttggagaaggaaatggcgccagaaaccatgataccctgcttggaaaatggccaccttgtagcagggaacaaggtgccagtaagctgtgtatgccttacagctgtgccgtcggatgagagcatctgggagatgctgtcccccaagctcagcacagctctgactgaagcgattaaagacagggggggctacctgaacaaagtctgcaacctcctgcccattaggatcctgtcctacatcttgctgccctgcactctgcccgtggagtcggccatcgctgcagtccacaggctggtgatgtggctccctgatatccatgaagatatccagtggctacagtgggcaacatcccaggtgtgtgcccgaatgaccatgtgcctgctcccctctaccagatccagagcatccaaggataaccatcaaacactcaagcatggatatcacccatctctccacaaaccccaaggcagctctgccggtttgtaaattgctggtctccgtgcttccgatgaacttgggcattctccctgtggatggttccaggagaggccatagctgaaggcactctgccttccaccccaagtccagtttgacctttatctagagcaacagtgtctagatgataggtgggtggggggtgctgtctctctgtttccctctgggaagggttctgttaacttttggaggcagctaggaaatttctctccaggagctgagcctgtgcagctgcccccttggtgctgtgtggtaacctcattgcctgtgaccctaggatcataggatctgggctaaataggtagttcatagaaaccaaagacaataatttggtgtttagaaaactacttttggtctgggtgaagtctggtgcttgagagttagtgcagagagaacggtcaaaccgtctctcagcctgtggatctatggggattccaagggcttcagtgtttggaaacggcaatccaaacgggcaatcttgtgcaatcttggaaggagaactgttcaggaagtgtgatgggatgagctgtggctgtctctgaaaagggcctaccatataacttattactttcaaggatacctttggctcttactaaaatagtttataaagcattttatagaaacacaccagggaatgcgtggtgaactacatgtatgatcagtgaactgtgactagaattaaccttaaaatctcttgtatgtggggccagagcaacacaggtgggaaacgcagcggacctctgcctcctcggcctcaacatgaacttggcttgctttctccaccgtctccaaatctttgtatagtcatcgaccattaccacctctcctttcccatctactacagcagccttaatggggataagtacccccttttctcaggtgtccgaataagctgtgggtgtggcctgtgtttcctgtaattctgaggttagattggaacataagcaagcagacaaacaagcagacaaacaaacaaggttctactcatattcctaagcagtgacagtgaaggcatgtgtctcccatgcctgagtctcctagggtcctagtgagctctgggttcatgcaagcacttccggaggaattgcaccctccatggaacacataatctccactgggttgatcctgattggataagaaaggatctcggggagagaatgtggttccagaggcaaagtgtctaggctacacagaaaaggtaagactgtccccaagggaagaaaacaaactgggagctggggtccagctcaattgttaagagtgcttctctagtatgcgtgaagcccagagtccaatctcagtaccagatacacggtacaggcagtgacatatgcctgtaatcccaaccctcaagcagtagaggcaagaggatcagaagttcatggtcatccttgactacttatacttagggagttggaggtcagcc

SEQ ID NO: 6 - DNA, 2759 bp, Rattus norvegicus
  source 1..2759: mol_type = genomic DNA
ggctgacctccaactccctaagtataagtagtcaaggatgaccatgaacttctgatcctcttgcctctactgcttgagggttgggattacaggcatatgtcactgcctgtaccgtgtatctggtactgagattggactctgggcttcacgcatactagagaagcactcttaacaattgagctggaccccagctcccagtttgttttcttcccttggggacagtcttaccttttctgtgtagcctagacactttgcctctggaaccacattctctccccgagatcctttcttatccaatcaggatcaacccagtggagattatgtgttccatggagggtgcaattcctccggaagtgcttgcatgaacccagagctcactaggaccctaggagactcaggcatgggagacacatgccttcactgtcactgcttaggaatatgagtagaaccttgtttgtttgtctgcttgtttgtctgcttgcttatgttccaatctaacctcagaattacaggaaacacaggccacacccacagcttattcggacacctgagaaaagggggtacttatccccattaaggctgctgtagtagatgggaaaggagaggtggtaatggtcgatgactatacaaagatttggagacggtggagaaagcaagccaagttcatgttgaggccgaggaggcagaggtccgctgcgtttcccacctgtgttgctctggccccacatacaagagattttaaggttaattctagtcacagttcactgatcatacatgtagttcaccacgcattccctggtgtgtttctataaaatgctttataaactattttagtaagagccaaaggtatccttgaaagtaataagttatatggtaggcccttttcagagacagccacagctcatcccatcacacttcctgaacagttctccttccaagattgcacaagattgcccgtttggattgccgtttccaaacactgaagcccttggaatccccatagatccacaggctgagagacggtttgaccgttctctctgcactaactctcaagcaccagacttcacccagaccaaaagtagttttctaaacaccaaattattgtctttggtttctatgaactacctatttagcccagatcctatgatcctagggtcacaggcaatgaggttaccacacagcaccaagggggcagctgcacaggctcagctcctggagagaaatttcctagctgcctccaaaagttaacagaacccttcccagagggaaacagagagacagcaccccccacccacctatcatctagacactgttgctctagataaaggtcaaactggacttggggtggaaggcagagtgccttcagctatggcctctcctggaaccatccacagggagaatgcccaagttcatcggaagcacggagaccagcaatttacaaaccggcagagctgccttggggtttgtggagagatgggtgatatccatgcttgagtgtttgatggttatccttggatgctctggatctggtagaggggagcaggcacatggtcattcgggcacacacctgggatgttgcccactgtagccactggatatcttcatggatatcagggagccacatcaccagcctgtggactgcagcgatggccgactccacgggcagagtgcagggcagcaagatgtaggacaggatcctaatgggcaggaggttgcagactttgttcaggtagccccccctgtctttaatcgcttcagtcagagctgtgctgagcttgggggacagcatctcccagatgctctcatccgacggcacagctgtaaggcatacacagcttactggcaccttgttccctgctacaaggtggccattttccaagcagggtatcatggtttctggcgccatttccttctccaaggacagactcaggctgcgctgtggcccattacagatgccgttctcttccaggaaccggaaggcgtccaggtacccttgaaagcacagctctcccatcaccttcacatcagatgggaagagtgctctggtcagaagatgaaggttcccagtgcagagacgaagactgaggttggtgatattcacctggaggaagttggtggacttcactttgggacagatgtcatgctcaccatagaaaggggacaccgtgatggtggttttggcgtccagcacagggacgttgtcactcactcctccatccacgtaccgctcacctcggaaggaaggagggattaggccagagaagagaggaatgaagcaggagcacaccagggcatccaccacttcgtctttggaatggaactcagacaccagcacgttctccccatcggacactctggtgagtgagatgtaaaccttgccagaaatgatctggtggacgttgtctgggagggtctcctgaaggccgtctctgacgcacttgttaatgttgaagaacgggtggagggtgccgatgttgcggctcctggctttccgcacgaggtccatgaggatctccatgatgtgatcgagagggagactgcacacgaaggtgaccgcgtgcagtgcaccggccgagcagccgaagaaagtgcgcgcttcgcggaggatgtgcggagcgcgctcgctcagacatagcgtagccccgatgtggtagaagcctaggaagccgcagcctgcgaacgacaggctccagcggcgctctgggtcgtacatggcgctggaggctccggaaggcgatgcagctcaattctgctccggg

SEQ ID NO: 7 - DNA, 2281 bp, Macaca fascicularis
  source 1..2281: mol_type = genomic DNA
tgctgcggatcaggacccgagccgatccccgatcccgactccgatccggatccgcgcccccgcccccgccccgccatgtacgacgccgagcgcggctggagcttgtccttcgcgggctgcggcttcctgggcttctaccacgtcggggcgacccggtgcctgagcgagcacgccccgcacctcctccgcgacgcgcgcatgttgttcggcgcctcggccggggcgttgcactgcgtcggcgtcctctccgggatcccgctggagcagactctgcaggtcctctcagatcttgtccggaaggccaggagtcggaacattggtatcttccatccatccttcaacataggcaagttcctccgacaggatctctacaaatacctcccggccaatgtccaccagctcatctctggcaaaatatgcgtctcactcaccagagtgtctgatggggaaaacgttctggtgtctgactttcagtccaaagacgaagtcgtggatgccttgatttgttcctgcttcatccctttctacagtggccttatccctccttccttcagaggcgtgcgatatgtggatggaggagcgagtgacaacgtacccttcattgatgccaagacaaccatcaccgtgtcgcccttctatggggagtacgacatctgccctaaagtcaagtccaccaactttcttcatgtggacatcaccaagctcagcctacgcctctgcacagggaacctctaccttctctcaagagcgtttgtccccccggatctcaaggtgctgggagagatatgccttcgaggatatttggacgcgttcaggttcttggaagagaagggcatctgcaacaagccccagcggggtctgaagtcatcctcagaagggatggattctgaggtcactgcgcccggctgggaaaacacaagtctggattcttccccggagccggctgccttggctatgaggctggatggagatgagctgctagaccacctgcgtctcagcatcctgccctgggatgagagcatcctggacaccctgtcgcccgagctcgctacagcagtgagtgaagcaatgaaagacaaaggtggatacatgagcaagatttgcaacttgctacccattaggataatatcttatgtgatgctgccctgtaccctgcctgtggagtctgccattgcgattgtccagagactggtgacatggcttccagatatgcccgacgatgtgcagtggctgcagtgggtgacctcacaggtcttcactcgagcgctgatgtgtctgcttcccgcctccaggtcccaaatgccagtgagcagcgaacaggcctccccatgcaaaccggagcaggactggcactgctggactccctgctcccccgaggactgtcctgcagaggccaaagcagaggctaccccacggtccatcctcaggtccagcctgaacttcttctggggcaataaagtacctgctggtgctgaggggctctccacctttcccagtttttcactggagaagaatttgtgagtcatttgaggaggcgagtctaggagattctttcagaggtgctaaagcttcccatctttgtgcagctacctccgcattgccgtgtagtgacccctgcctgtgacgtggaggatcccagcctctgagctgagttggttttatgaaaagctaggaagcaatgtttggtctgtgcagcagtccagcacttaagtctaatacgtcagcatgcgttagttcagctggttgggaaatgacaccgggaagcctagcgcagagggtcccttactgactatttcatggtcctattaatggtcagactgttccagtgtgaggttcttagaatgactagtgtttggatgggtgggggccttgtggtggggggtgggctggcctatgtgtgatcttgtggggtggaaggaagagagtagcacaatcccacctccccatgccgtgggaaggggtgcacttggttcccaagaaggacactgcctgtcaggtggcctgcaaatataataaccttgacaactaaaaacctctccatgggggtgggaggtaccaagataataaccgatttacattttagagcacctttttcacctaactaaaataatgtttaaagagttttatataaaaatgtaaggaagagttgttatctgttgaattttgtattatatgaatcagtgagatgttaatagaataagcctttaaaaagaaaaaaagttcagccaggcgctgtggcacacgcctgtaatcccagcactttggaaggccgaggtgggca

SEQ ID NO: 8 - DNA, 2281 bp, Macaca fascicularis
  source 1..2281: mol_type = genomic DNA
tgcccacctcggccttccaaagtgctgggattacaggcgtgtgccacagcgcctggctgaactttttttctttttaaaggcttattctattaacatctcactgattcatataatacaaaattcaacagataacaactcttccttacatttttatataaaactctttaaacattattttagttaggtgaaaaaggtgctctaaaatgtaaatcggttattatcttggtacctcccacccccatggagaggtttttagttgtcaaggttattatatttgcaggccacctgacaggcagtgtccttcttgggaaccaagtgcaccccttcccacggcatggggaggtgggattgtgctactctcttccttccaccccacaagatcacacataggccagcccaccccccaccacaaggcccccacccatccaaacactagtcattctaagaacctcacactggaacagtctgaccattaataggaccatgaaatagtcagtaagggaccctctgcgctaggcttcccggtgtcatttcccaaccagctgaactaacgcatgctgacgtattagacttaagtgctggactgctgcacagaccaaacattgcttcctagcttttcataaaaccaactcagctcagaggctgggatcctccacgtcacaggcaggggtcactacacggcaatgcggaggtagctgcacaaagatgggaagctttagcacctctgaaagaatctcctagactcgcctcctcaaatgactcacaaattcttctccagtgaaaaactgggaaaggtggagagcccctcagcaccagcaggtactttattgccccagaagaagttcaggctggacctgaggatggaccgtggggtagcctctgctttggcctctgcaggacagtcctcgggggagcagggagtccagcagtgccagtcctgctccggtttgcatggggaggcctgttcgctgctcactggcatttgggacctggaggcgggaagcagacacatcagcgctcgagtgaagacctgtgaggtcacccactgcagccactgcacatcgtcgggcatatctggaagccatgtcaccagtctctggacaatcgcaatggcagactccacaggcagggtacagggcagcatcacataagatattatcctaatgggtagcaagttgcaaatcttgctcatgtatccacctttgtctttcattgcttcactcactgctgtagcgagctcgggcgacagggtgtccaggatgctctcatcccagggcaggatgctgagacgcaggtggtctagcagctcatctccatccagcctcatagccaaggcagccggctccggggaagaatccagacttgtgttttcccagccgggcgcagtgacctcagaatccatcccttctgaggatgacttcagaccccgctggggcttgttgcagatgcccttctcttccaagaacctgaacgcgtccaaatatcctcgaaggcatatctctcccagcaccttgagatccggggggacaaacgctcttgagagaaggtagaggttccctgtgcagaggcgtaggctgagcttggtgatgtccacatgaagaaagttggtggacttgactttagggcagatgtcgtactccccatagaagggcgacacggtgatggttgtcttggcatcaatgaagggtacgttgtcactcgctcctccatccacatatcgcacgcctctgaaggaaggagggataaggccactgtagaaagggatgaagcaggaacaaatcaaggcatccacgacttcgtctttggactgaaagtcagacaccagaacgttttccccatcagacactctggtgagtgagacgcatattttgccagagatgagctggtggacattggccgggaggtatttgtagagatcctgtcggaggaacttgcctatgttgaaggatggatggaagataccaatgttccgactcctggccttccggacaagatctgagaggacctgcagagtctgctccagcgggatcccggagaggacgccgacgcagtgcaacgccccggccgaggcgccgaacaacatgcgcgcgtcgcggaggaggtgcggggcgtgctcgctcaggcaccgggtcgccccgacgtggtagaagcccaggaagccgcagcccgcgaaggacaagctccagccgcgctcggcgtcgtacatggcggggcgggggcgggggcgcggatccggatcggagtcgggatcggggatcggctcgggtcctgatccgcagca

SEQ ID NO: 9 - DNA, 1544 bp, Macaca mulatta
  source 1..1544: mol_type = genomic DNA
cgcttgcgggcgcccggcggagctgctgcggatcaggacccgagccgatccccgatcccgactccgatccggatccgcgcccccgcccccgccccgccatgtacgacgccgagcgcggctggagcttgtccttcgcgggctgcggcttcctgggcttctaccacgtcggggcgacccgctgcctgagcgagcacgccccgcacctcctccgcgacgcgcgcatgttgttcggcgcctcggccggggcgttgcactgcgtcggcgtcctctccgggatcccgctggagcagactctgcaggtcctctcagatcttgtccggaaggccaggagtcggaacattggtatcttccatccatccttcaacataggcaagttcctccgacaggatctctacaaatacctcccggccaatgtccaccagctcatctctggcaaaatatgcgtctcactcaccagagtgtctgatggggaaaacgttctggtgtctgactttcagtccaaagacgaagtcgtggatgccttgatttgttcctgcttcatccctttctacagtggccttatccctccttccttcagaggcgtgcgatatgtggatggaggagcgagtgacaacgtacccttcattgatgccaagacaaccatcaccgtgtcgcccttctatggggagtacgacatctgccctaaagtcaagtccaccaactttcttcatgtggacatcaccaagctcagcctacgcctctgcacagggaacctctaccttctctcaagagcgtttgtccccccggatctcaaggtgctgggagagatatgccttcgaggatatttggacgcgttcaggttcttggaagagaagggcatctgcaacaagccccagcggggtctgaagtcatcctcagaagggatggattctgaggtcactgcgcccggctgggaaaacacaagtctggattcttccccggagccggctgccttggctatgaggctggatggagatgagctgctagaccacctgcgtctcagcatcctgccctgggatgagagcatcctggacaccctgtcgcccgagctcgctacagcagtgagtgaagcaatgaaagacaaaggtggatacatgagcaagatttgcaacttgctacccattaggataatgtcttatgtgatgctgccctgtaccctgcctgtggagtctgccattgcgattgtccagagactggtgacatggcttccggatatgcccgacgatgtgcagtggctgcagtgggtgacctcacaggtcttcactcgagcgctgatgtgtctgcttcccgcctccaggtcccaaatgccagtgagcggcgaacaggcctccccatgcaaaccggagcaggactggcactgctggactccctgctcccccgaggactgtcctgcagaggccaaagcagaggctaccccacggtccatcctcaggtccagcctgaacttcttctggggcaataaagtacctgctggtgctgaggggctctccacctttcccagtttttcactggagaagaatttgtga

SEQ ID NO: 10 - DNA, 1544 bp, Macaca mulatta
  source 1..1544: mol_type = genomic DNA
tcacaaattcttctccagtgaaaaactgggaaaggtggagagcccctcagcaccagcaggtactttattgccccagaagaagttcaggctggacctgaggatggaccgtggggtagcctctgctttggcctctgcaggacagtcctcgggggagcagggagtccagcagtgccagtcctgctccggtttgcatggggaggcctgttcgccgctcactggcatttgggacctggaggcgggaagcagacacatcagcgctcgagtgaagacctgtgaggtcacccactgcagccactgcacatcgtcgggcatatccggaagccatgtcaccagtctctggacaatcgcaatggcagactccacaggcagggtacagggcagcatcacataagacattatcctaatgggtagcaagttgcaaatcttgctcatgtatccacctttgtctttcattgcttcactcactgctgtagcgagctcgggcgacagggtgtccaggatgctctcatcccagggcaggatgctgagacgcaggtggtctagcagctcatctccatccagcctcatagccaaggcagccggctccggggaagaatccagacttgtgttttcccagccgggcgcagtgacctcagaatccatcccttctgaggatgacttcagaccccgctggggcttgttgcagatgcccttctcttccaagaacctgaacgcgtccaaatatcctcgaaggcatatctctcccagcaccttgagatccggggggacaaacgctcttgagagaaggtagaggttccctgtgcagaggcgtaggctgagcttggtgatgtccacatgaagaaagttggtggacttgactttagggcagatgtcgtactccccatagaagggcgacacggtgatggttgtcttggcatcaatgaagggtacgttgtcactcgctcctccatccacatatcgcacgcctctgaaggaaggagggataaggccactgtagaaagggatgaagcaggaacaaatcaaggcatccacgacttcgtctttggactgaaagtcagacaccagaacgttttccccatcagacactctggtgagtgagacgcatattttgccagagatgagctggtggacattggccgggaggtatttgtagagatcctgtcggaggaacttgcctatgttgaaggatggatggaagataccaatgttccgactcctggccttccggacaagatctgagaggacctgcagagtctgctccagcgggatcccggagaggacgccgacgcagtgcaacgccccggccgaggcgccgaacaacatgcgcgcgtcgcggaggaggtgcggggcgtgctcgctcaggcagcgggtcgccccgacgtggtagaagcccaggaagccgcagcccgcgaaggacaagctccagccgcgctcggcgtcgtacatggcggggcgggggcgggggcgcggatccggatcggagtcgggatcggggatcggctcgggtcctgatccgcagcagctccgccgggcgcccgcaagcg

SEQ ID NO: 11 - DNA, 1495 bp, Macaca fascicularis
  source 1..1495: mol_type = genomic DNA
gctgctgcggatcaggacccgagccgatccccgatcccgactccgatccggatccgcgcccccgcccccgccccgccatgtacgacgccgagcgcggctggagcttgtccttcgcgggctgcggcttcctgggcttctaccacgtcggggcgacccggtgcctgagcgagcacgccccgcacctcctccgcgacgcgcgcatgttgttcggcgcctcggccggggcgttgcactgcgtcggcgtcctctccgggatcccgctggagcagactctgcaggtcctctcagatcttgtccggaaggccaggagtcggaacattggtatcttccatccatccttcaacataggcaagttcctccgacaggatctctacaaatacctcccggccaatgtccaccagctcatctctggcaaaatatgcgtctcactcaccagagtgtctgatggggaaaacgttctggtgtctgactttcagtccaaagacgaagtcgtggatgccttgatttgttcctgcttcatccctttctacagtggccttatccctccttccttcagaggcgtgcgatatgtggatggaggagcgagtgacaacgtacccttcattgatgccaagacaaccatcaccgtgtcgcccttctatggggagtacgacatctgccctaaagtcaagtccaccaactttcttcatgtggacatcaccaagctcagcctacgcctctgcacagggaacctctaccttctctcaagagcgtttgtccccccggatctcaaggtgctgggagagatatgccttcgaggatatttggacgcgttcaggttcttggaagagaagggcatctgcaacaagccccagcggggtctgaagtcatcctcagaagggatggattctgaggtcactgcgcccggctgggaaaacacaagtctggattcttccccggagccggctgccttggctatgaggctggatggagatgagctgctagaccacctgcgtctcagcatcctgccctgggatgagagcatcctggacaccctgtcgcccgagctcgctacagcagtgagtgaagcaatgaaagacaaaggtggatacatgagcaagatttgcaacttgctacccattaggataatatcttatgtgatgctgccctgtaccctgcctgtggagtctgccattgcgattgtccagagtgtaagtcctttgagctttcttgaaccagaagtggcctcattttgctttagagatttcagatgggctcatccttgtcctgtcatcccagatccacctgctgggaagtcatcagattggagatgatgttggcggcttttgtaaacaaagggtggtgttgtaagctgttgtgtctgcctgtgtgtgtgtttgtgtacttggtcttatctctgcagactggtgacatggcttccagatatgcccgacgatgtgcagtggctgcagtgggtgacctcacaggtcttcactcgagcgctgatgtgtctgct

SEQ ID NO: 12 - DNA, 1495 bp, Macaca fascicularis
  source 1..1495: mol_type = genomic DNA
agcagacacatcagcgctcgagtgaagacctgtgaggtcacccactgcagccactgcacatcgtcgggcatatctggaagccatgtcaccagtctgcagagataagaccaagtacacaaacacacacacaggcagacacaacagcttacaacaccaccctttgtttacaaaagccgccaacatcatctccaatctgatgacttcccagcaggtggatctgggatgacaggacaaggatgagcccatctgaaatctctaaagcaaaatgaggccacttctggttcaagaaagctcaaaggacttacactctggacaatcgcaatggcagactccacaggcagggtacagggcagcatcacataagatattatcctaatgggtagcaagttgcaaatcttgctcatgtatccacctttgtctttcattgcttcactcactgctgtagcgagctcgggcgacagggtgtccaggatgctctcatcccagggcaggatgctgagacgcaggtggtctagcagctcatctccatccagcctcatagccaaggcagccggctccggggaagaatccagacttgtgttttcccagccgggcgcagtgacctcagaatccatcccttctgaggatgacttcagaccccgctggggcttgttgcagatgcccttctcttccaagaacctgaacgcgtccaaatatcctcgaaggcatatctctcccagcaccttgagatccggggggacaaacgctcttgagagaaggtagaggttccctgtgcagaggcgtaggctgagcttggtgatgtccacatgaagaaagttggtggacttgactttagggcagatgtcgtactccccatagaagggcgacacggtgatggttgtcttggcatcaatgaagggtacgttgtcactcgctcctccatccacatatcgcacgcctctgaaggaaggagggataaggccactgtagaaagggatgaagcaggaacaaatcaaggcatccacgacttcgtctttggactgaaagtcagacaccagaacgttttccccatcagacactctggtgagtgagacgcatattttgccagagatgagctggtggacattggccgggaggtatttgtagagatcctgtcggaggaacttgcctatgttgaaggatggatggaagataccaatgttccgactcctggccttccggacaagatctgagaggacctgcagagtctgctccagcgggatcccggagaggacgccgacgcagtgcaacgccccggccgaggcgccgaacaacatgcgcgcgtcgcggaggaggtgcggggcgtgctcgctcaggcaccgggtcgccccgacgtggtagaagcccaggaagccgcagcccgcgaaggacaagctccagccgcgctcggcgtcgtacatggcggggcgggggcgggggcgcggatccggatcggagtcgggatcggggatcggctcgggtcctgatccgcagcagc

SEQ ID NO: 13 - skipped

SEQ ID NO: 14 - protein, 16 aa, unidentified
  REGION 1..16: note = Description of Unknown: RFGF sequence
AAVALLPAVLLALLAP

SEQ ID NO: 15 - protein, 11 aa, unidentified
  REGION 1..11: note = Description of Unknown: RFGF analogue sequence
AALLPVLLAAP

SEQ ID NO: 16 - protein, 13 aa, Human immunodeficiency virus 1
GRKKRRQRRRPPQ

SEQ ID NO: 17 - protein, 16 aa, Drosophila sp.
RQIKIWFQNRRMKWKK

SEQ ID NO: 18 - DNA, 21 bp, synthetic construct
  modified_base 2..3: mod_base = OTHER; note = uracil
  modified_base 8: mod_base = OTHER; note = uracil
  modified_base 12: mod_base = OTHER; note = uracil
  modified_base 15..16: mod_base = OTHER; note = uracil
  source 1..21: mol_type = other DNA
cttacgctgagtacttcgatt

SEQ ID NO: 19 - DNA, 21 bp, synthetic construct
  modified_base 1: mod_base = OTHER; note = uracil
  modified_base 7: mod_base = OTHER; note = uracil
  modified_base 10: mod_base = OTHER; note = uracil
  modified_base 16: mod_base = OTHER; note = uracil
  source 1..21: mol_type = other DNA
tcgaagtactcagcgtaagtt

SEQ ID NO: 20 - RNA, 21 nt, synthetic construct
  source 1..21: mol_type = other RNA
cgcggctggagcttgtccttt

SEQ ID NO: 21 - RNA, 21 nt, synthetic construct
  source 1..21: mol_type = other RNA
gcggcttcctgggcttctact

SEQ ID NO: 22 - RNA, 21 nt, synthetic construct
  source 1..21: mol_type = other RNA
cggcttcctgggcttctacct

SEQ ID NO: 23 - RNA, 21 nt, synthetic construct
  source 1..21: mol_type = other RNA
cttcctgggcttctaccacgt

SEQ ID NO: 24 - RNA, 21 nt, synthetic construct
  source 1..21: mol_type = other RNA
cctgggcttctaccacgtcgt

SEQ ID NO: 25 - RNA, 21 nt, synthetic construct
  source 1..21: mol_type = other RNA
ctgggcttctaccacgtcggt

SEQ ID NO: 26 - RNA, 21 nt, synthetic construct
  source 1..21: mol_type = other RNA
cgcgacgcgcgcatgttgttt

SEQ ID NO: 27 - RNA, 21 nt, synthetic construct
  source 1..21: mol_type = other RNA
ccgctggagcagactctgcat

SEQ ID NO: 28 - RNA, 21 nt, synthetic construct
  source 1..21: mol_type = other RNA
ggagcagactctgcaggtcct

SEQ ID NO: 29 - RNA, 21 nt, synthetic construct
  source 1..21: mol_type = other RNA
gactctgcaggtcctctcagt

SEQ ID NO: 30 - RNA, 21 nt, synthetic construct
  source 1..21: mol_type = other RNA
ctctgcaggtcctctcagatt

SEQ ID NO: 31 - RNA, 21 nt, synthetic construct
  source 1..21: mol_type = other RNA
ctgcaggtcctctcagatctt

SEQ ID NO: 32 - RNA, 21 nt, synthetic construct
  source 1..21: mol_type = other RNA
tgcaggtcctctcagatcttt

SEQ ID NO: 33 - RNA, 21 nt, synthetic construct
  source 1..21: mol_type = other RNA
gcaggtcctctcagatcttgt

SEQ ID NO: 34 - RNA, 21 nt, synthetic construct
  source 1..21: mol_type = other RNA
aggccaggagtcggaacattt

SEQ ID NO: 35 - RNA, 21 nt, synthetic construct
  source 1..21: mol_type = other RNA
ggccaggagtcggaacattgt

SEQ ID NO: 36 - RNA, 21 nt, synthetic construct
  source 1..21: mol_type = other RNA
gccaggagtcggaacattggt

SEQ ID NO: 37 - RNA, 21 nt, synthetic construct
  source 1..21: mol_type = other RNA
gcatcttccatccatccttct

SEQ ID NO: 38 - RNA, 21 nt, synthetic construct
  source 1..21: mol_type = other RNA
tgcctcccggccaatgtccat

SEQ ID NO: 39 - RNA, 21 nt, synthetic construct
  source 1..21: mol_type = other RNA
caatgtccaccagctcatctt

SEQ ID NO: 40 - RNA, 21 nt, synthetic construct
  source 1..21: mol_type = other RNA
aatgtccaccagctcatctct

SEQ ID NO: 41 - RNA, 21 nt, synthetic construct
  source 1..21: mol_type = other RNA
gtccaaagacgaagtcgtggt

SEQ ID NO: 42 - RNA, 21 nt, synthetic construct
  source 1..21: mol_type = other RNA
tccaaagacgaagtcgtggat

SEQ ID NO: 43 - RNA, 21 nt, synthetic construct
  source 1..21: mol_type = other RNA
ccaaagacgaagtcgtggatt

SEQ ID NO: 44 - RNA, 21 nt, synthetic construct
  source 1..21: mol_type = other RNA
caaagacgaagtcgtggatgt

SEQ ID NO: 45 - RNA, 21 nt, synthetic construct
  source 1..21: mol_type = other RNA
agacgaagtcgtggatgcctt

SEQ ID NO: 46 - RNA, 21 nt, synthetic construct
  source 1..21: mol_type = other RNA
cttctacagtggccttatcct

SEQ ID NO: 47 - RNA, 21 nt, synthetic construct
  source 1..21: mol_type = other RNA
ttctacagtggccttatccct

SEQ ID NO: 48 - RNA, 21 nt, synthetic construct
  source 1..21: mol_type = other RNA
tctacagtggccttatccctt

SEQ ID NO: 49 - RNA, 21 nt, synthetic construct
  source 1..21: mol_type = other RNA
ctacagtggccttatccctct

SEQ ID NO: 50 - RNA, 21 nt, synthetic construct
  source 1..21: mol_type = other RNA
agtggccttatccctccttct

SEQ ID NO: 51 - RNA, 21 nt, synthetic construct
  source 1..21: mol_type = other RNA
tggccttatccctccttcctt

SEQ ID NO: 52 - RNA, 21 nt, synthetic construct
  source 1..21: mol_type = other RNA
cttatccctccttccttcagt

SEQ ID NO: 53 - RNA, 21 nt, synthetic construct
  source 1..21: mol_type = other RNA
ttatccctccttccttcagat

SEQ ID NO: 54 - RNA, 21 nt, synthetic construct
  source 1..21: mol_type = other RNA
ccctccttccttcagaggcgt

SEQ ID NO: 55 - RNA, 21 nt, synthetic construct
  source 1..21: mol_type = other RNA
cctccttccttcagaggcgtt

SEQ ID NO: 56 - RNA, 21 nt, synthetic construct
  source 1..21: mol_type = other RNA
ccttccttcagaggcgtgcgt

SEQ ID NO: 57 - RNA, 21 nt, synthetic construct
  source 1..21: mol_type = other RNA
tccttcagaggcgtgcgatat

SEQ ID NO: 58 - RNA, 21 nt, synthetic construct
  source 1..21: mol_type = other RNA
cttcagaggcgtgcgatatgt

SEQ ID NO: 59 - RNA, 21 nt, synthetic construct
  source 1..21: mol_type = other RNA
ttcagaggcgtgcgatatgtt

SEQ ID NO: 60 - RNA, 21 nt, synthetic construct
  source 1..21: mol_type = other RNA
tcagaggcgtgcgatatgtgt

SEQ ID NO: 61 - RNA, 21 nt, synthetic construct
  source 1..21: mol_type = other RNA
cagaggcgtgcgatatgtggt

SEQ ID NO: 62 - RNA, 21 nt, synthetic construct
  source 1..21: mol_type = other RNA
agaggcgtgcgatatgtggat

SEQ ID NO: 63 - RNA, 21 nt, synthetic construct
  source 1..21: mol_type = other RNA
aggcgtgcgatatgtggatgt

SEQ ID NO: 64 - RNA, 21 nt, synthetic construct
  source 1..21: mol_type = other RNA
ggcgtgcgatatgtggatggt

SEQ ID NO: 65 - RNA, 21 nt, synthetic construct
  source 1..21: mol_type = other RNA
cgtgcgatatgtggatggagt

SEQ ID NO: 66 - RNA, 21 nt, synthetic construct
  source 1..21: mol_type = other RNA
gtgcgatatgtggatggaggt

SEQ ID NO: 67 - RNA, 21 nt, synthetic construct
  source 1..21: mol_type = other RNA
gtgagtgacaacgtacccttt

SEQ ID NO: 68 - RNA, 21 nt, synthetic construct
  source 1..21: mol_type = other RNA
agtgacaacgtacccttcatt

SEQ ID NO: 69 - RNA, 21 nt, synthetic construct
  source 1..21: mol_type = other RNA
gtgacaacgtacccttcattt

SEQ ID NO: 70 - RNA, 21 nt, synthetic construct
  source 1..21: mol_type = other RNA
tgacaacgtacccttcattgt

SEQ ID NO: 71 - RNA, 21 nt, synthetic construct
  source 1..21: mol_type = other RNA
gacaacgtacccttcattgat

SEQ ID NO: 72 - RNA, 21 nt, synthetic construct
  source 1..21: mol_type = other RNA
acaacgtacccttcattgatt

SEQ ID NO: 73 - RNA, 21 nt, synthetic construct
  source 1..21: mol_type = other RNA
caacgtacccttcattgatgt

SEQ ID NO: 74 - RNA, 21 nt, synthetic construct
  source 1..21: mol_type = other RNA
aacgtacccttcattgatgct

SEQ ID NO: 75 - RNA, 21 nt, synthetic construct
  source 1..21: mol_type = other RNA
cgtacccttcattgatgccat

SEQ ID NO: 76 - RNA, 21 nt, synthetic construct
  source 1..21: mol_type = other RNA
gtacccttcattgatgccaat

SEQ ID NO: 77 - RNA, 21 nt, synthetic construct
  source 1..21: mol_type = other RNA
tacgacatctgccctaaagtt

SEQ ID NO: 78 - RNA, 21 nt, synthetic construct
  source 1..21: mol_type = other RNA
cgacatctgccctaaagtcat

SEQ ID NO: 79 - RNA, 21 nt, synthetic construct
  source 1..21: mol_type = other RNA
gacatctgccctaaagtcaat

SEQ ID NO: 80 - RNA, 21 nt, synthetic construct
  source 1..21: mol_type = other RNA
acatctgccctaaagtcaagt

SEQ ID NO: 81 - RNA, 21 nt, synthetic construct
  source 1..21: mol_type = other RNA
tctgccctaaagtcaagtcct

SEQ ID NO: 82 - RNA, 21 nt, synthetic construct
  source 1..21: mol_type = other RNA
ctgccctaaagtcaagtccat

SEQ ID NO: 83 - RNA, 21 nt, synthetic construct
  source 1..21: mol_type = other RNA
atgtggacatcaccaagctct

SEQ ID NO: 84 - RNA, 21 nt, synthetic construct
  source 1..21: mol_type = other RNA
tgtggacatcaccaagctcat

SEQ ID NO: 85 - RNA, 21 nt, synthetic construct
  source 1..21: mol_type = other RNA
gtctacgcctctgcacagggt

SEQ ID NO: 86 - RNA, 21 nt, synthetic construct
  source 1..21: mol_type = other RNA
cctctgcacagggaacctctt

SEQ ID NO: 87 - RNA, 21 nt, synthetic construct
  source 1..21: mol_type = other RNA
tgcacagggaacctctacctt

SEQ ID NO: 88 - RNA, 21 nt, synthetic construct
  source 1..21: mol_type = other RNA
gcacagggaacctctaccttt

SEQ ID NO: 89 - RNA, 21 nt, synthetic construct
  source 1..21: mol_type = other RNA
cacagggaacctctaccttct

SEQ ID NO: 90 - RNA, 21 nt, synthetic construct
  source 1..21: mol_type = other RNA
cagggaacctctaccttctct

SEQ ID NO: 91 - RNA, 21 nt, synthetic construct
  source 1..21: mol_type = other RNA
agggaacctctaccttctctt

SEQ ID NO: 92 - RNA, 21 nt, synthetic construct
  source 1..21: mol_type = other RNA
gggaacctctaccttctctct

SEQ ID NO: 93 - RNA, 21 nt, synthetic construct
  source 1..21: mol_type = other RNA
caaggtgctgggagagatatt

SEQ ID NO: 94 - RNA, 21 nt, synthetic construct
  source 1..21: mol_type = other RNA
aaggtgctgggagagatatgt

SEQ ID NO: 95 - RNA, 21 nt, synthetic construct
  source 1..21: mol_type = other RNA
aggtgctgggagagatatgct

SEQ ID NO: 96 - RNA, 21 nt, synthetic construct
  source 1..21: mol_type = other RNA
ggtgctgggagagatatgcct

SEQ ID NO: 97 - RNA, 21 nt, synthetic construct
  source 1..21: mol_type = other RNA
gtgctgggagagatatgcctt

SEQ ID NO: 98 - RNA, 21 nt, synthetic construct
  source 1..21: mol_type = other RNA
tgctgggagagatatgccttt

SEQ ID NO: 99 - RNA, 21 nt, synthetic construct
  source 1..21: mol_type = other RNA
tgggagagatatgccttcgat

SEQ ID NO: 100 - RNA, 21 nt, synthetic construct
  source 1..21: mol_type = other RNA
gggagagatatgccttcgagt

SEQ ID NO: 101 - RNA, 21 nt, synthetic construct
  source 1..21: mol_type = other RNA
ggagagatatgccttcgaggt

SEQ ID NO: 102 - RNA, 21 nt, synthetic construct
  source 1..21: mol_type = other RNA
gagagatatgccttcgaggat

SEQ ID NO: 103 - RNA, 21 nt, synthetic construct
  source 1..21: mol_type = other RNA
gagatatgccttcgaggatat

SEQ ID NO: 104 - RNA, 21 nt, synthetic construct
  source 1..21: mol_type = other RNA
gatatgccttcgaggatattt

SEQ ID NO: 105 - RNA, 21 nt, synthetic construct
  source 1..21: mol_type = other RNA
atatgccttcgaggatatttt

SEQ ID NO: 106 - RNA, 21 nt, synthetic construct
  source 1..21: mol_type = other RNA
tatgccttcgaggatatttgt

SEQ ID NO: 107 - RNA, 21 nt, synthetic construct
  source 1..21: mol_type = other RNA
atgccttcgaggatatttggt

SEQ ID NO: 108 - RNA, 21 nt, synthetic construct
  source 1..21: mol_type = other RNA
tgccttcgaggatatttggat

SEQ ID NO: 109 - RNA, 21 nt, synthetic construct
  source 1..21: mol_type = other RNA
cattcaggttcttggaagagt

SEQ ID NO: 110 - RNA, 21 nt, synthetic construct
  source 1..21: mol_type = other RNA
aggttcttggaagagaagggt

SEQ ID NO: 111 - RNA, 21 nt, synthetic construct
  source 1..21: mol_type = other RNA
ggttcttggaagagaagggct

SEQ ID NO: 112 - RNA, 21 nt, synthetic construct
  source 1..21: mol_type = other RNA
gttcttggaagagaagggcat

SEQ ID NO: 113 - RNA, 21 nt, synthetic construct
  source 1..21: mol_type = other RNA
aagagaagggcatctgcaact

SEQ ID NO: 114 - RNA, 21 nt, synthetic construct
  source 1..21: mol_type = other RNA
gcctgaagtcatcctcagaat

SEQ ID NO: 115 - RNA, 21 nt, synthetic construct
  source 1..21: mol_type = other RNA
ctgaagtcatcctcagaaggt

SEQ ID NO: 116 - RNA, 21 nt, synthetic construct
  source 1..21: mol_type = other RNA
tgaagtcatcctcagaagggt

SEQ ID NO: 117 - RNA, 21 nt, synthetic construct
  source 1..21: mol_type = other RNA
gaagtcatcctcagaagggat

SEQ ID NO: 118 - RNA, 21 nt, synthetic construct
  source 1..21: mol_type = other RNA
aagtcatcctcagaagggatt

SEQ ID NO: 119 - RNA, 21 nt, synthetic construct
  source 1..21: mol_type = other RNA
agtcatcctcagaagggatgt

SEQ ID NO: 120 - RNA, 21 nt, synthetic construct
  source 1..21: mol_type = other RNA
tcatcctcagaagggatggat

SEQ ID NO: 121 - RNA, 21 nt, synthetic construct
  source 1..21: mol_type = other RNA
gggagatgagctgctagacct

SEQ ID NO: 122 - RNA, 21 nt, synthetic construct
  source 1..21: mol_type = other RNA
ggagatgagctgctagaccat

SEQ ID NO: 123 - RNA, 21 nt, synthetic construct
  source 1..21: mol_type = other RNA
agatgagctgctagaccacct

SEQ ID NO: 124 - RNA, 21 nt, synthetic construct
  source 1..21: mol_type = other RNA
ctgctagaccacctgcgtctt

SEQ ID NO: 125 - RNA, 21 nt, synthetic construct
  source 1..21: mol_type = other RNA
ctagaccacctgcgtctcagt

SEQ ID NO: 126 - RNA, 21 nt, synthetic construct
  source 1..21: mol_type = other RNA
accacctgcgtctcagcatct

SEQ ID NO: 127 - RNA, 21 nt, synthetic construct
  source 1..21: mol_type = other RNA
gcgtctcagcatcctgccctt

SEQ ID NO: 128 - RNA, 21 nt, synthetic construct
  source 1..21: mol_type = other RNA
gcatcctgccctgggatgagt

SEQ ID NO: 129 - RNA, 21 nt, synthetic construct
  source 1..21: mol_type = other RNA
catcctgccctgggatgagat

SEQ ID NO: 130 - RNA, 21 nt, synthetic construct
  source 1..21: mol_type = other RNA
atcctgccctgggatgagagt

SEQ ID NO: 131 - RNA, 21 nt, synthetic construct
  source 1..21: mol_type = other RNA
tgccctgggatgagagcatct

SEQ ID NO: 132 - RNA, 21 nt, synthetic construct
  source 1..21: mol_type = other RNA
cctgggatgagagcatcctgt

SEQ ID NO: 133 - RNA, 21 nt, synthetic construct
  source 1..21: mol_type = other RNA
aatgaaagacaaaggtggatt

SEQ ID NO: 134 - RNA, 21 nt, synthetic construct
  source 1..21: mol_type = other RNA
atgaaagacaaaggtggatat

SEQ ID NO: 135 - RNA, 21 nt, synthetic construct
  source 1..21: mol_type = other RNA
agacaaaggtggatacatgat

SEQ ID NO: 136 - RNA, 21 nt, synthetic construct
  source 1..21: mol_type = other RNA
acaaaggtggatacatgagct

SEQ ID NO: 137 - RNA, 21 nt, synthetic construct
  source 1..21: mol_type = other RNA
caaaggtggatacatgagcat

SEQ ID NO: 138 - RNA, 21 nt, synthetic construct
  source 1..21: mol_type = other RNA
aaggtggatacatgagcaagt

SEQ ID NO: 139 - RNA, 21 nt, synthetic construct
  source 1..21: mol_type = other RNA
ggatacatgagcaagatttgt

SEQ ID NO: 140 - RNA, 21 nt, synthetic construct
  source 1..21: mol_type = other RNA
gatacatgagcaagatttgct

SEQ ID NO: 141 - RNA, 21 nt, synthetic construct
  source 1..21: mol_type = other RNA
atacatgagcaagatttgcat

SEQ ID NO: 142 - RNA, 21 nt, synthetic construct
  source 1..21: mol_type = other RNA
tacatgagcaagatttgcaat

SEQ ID NO: 143 - RNA, 21 nt, synthetic construct
  source 1..21: mol_type = other RNA
acatgagcaagatttgcaact

SEQ ID NO: 144 - RNA, 21 nt, synthetic construct
  source 1..21: mol_type = other RNA
tgagcaagatttgcaacttgt

SEQ ID NO: 145 - RNA, 21 nt, synthetic construct
  source 1..21: mol_type = other RNA
gagcaagatttgcaacttgct

SEQ ID NO: 146 - RNA, 21 nt, synthetic construct
  source 1..21: mol_type = other RNA
agcaagatttgcaacttgctt

SEQ ID NO: 147 - RNA, 21 nt, synthetic construct
  source 1..21: mol_type = other RNA
gcaagatttgcaacttgctat

SEQ ID NO: 148 - RNA, 21 nt, synthetic construct
  source 1..21: mol_type = other RNA
tgcaacttgctacccattagt

SEQ ID NO: 149 - RNA, 21 nt, synthetic construct
  source 1..21: mol_type = other RNA
gcaacttgctacccattaggt

SEQ ID NO: 150 - RNA, 21 nt, synthetic construct
  source 1..21: mol_type = other RNA
caacttgctacccattaggat

SEQ ID NO: 151 - RNA, 21 nt, synthetic construct
  source 1..21: mol_type = other RNA
aacttgctacccattaggatt

SEQ ID NO: 152 - RNA, 21 nt, synthetic construct
  source 1..21: mol_type = other RNA
acttgctacccattaggatat

SEQ ID NO: 153 - RNA, 21 nt, synthetic construct
  source 1..21: mol_type = other RNA
gctgccctgtaccctgcctgt

SEQ ID NO: 154 - RNA, 21 nt, synthetic construct
  source 1..21: mol_type = other RNA
ccctgtaccctgcctgtggat

SEQ ID NO: 155 - RNA, 21 nt, synthetic construct
  source 1..21: mol_type = other RNA
aatctgccattgcgattgtct

SEQ ID NO: 156 - RNA, 21 nt, synthetic construct
  source 1..21: mol_type = other RNA
ctgccattgcgattgtccagt

SEQ ID NO: 157 - RNA, 21 nt, synthetic construct
  source 1..21: mol_type = other RNA
tgccattgcgattgtccagat

SEQ ID NO: 158 - RNA, 21 nt, synthetic construct
  source 1..21: mol_type = other RNA
cattgcgattgtccagagact

SEQ ID NO: 159 - RNA, 21 nt, synthetic construct
  source 1..21: mol_type = other RNA
ttgcgattgtccagagactgt

SEQ ID NO: 160 - RNA, 21 nt, synthetic construct
  source 1..21: mol_type = other RNA
tgcgattgtccagagactggt

SEQ ID NO: 161 - RNA, 21 nt, synthetic construct
  source 1..21: mol_type = other RNA
gcgattgtccagagactggtt

SEQ ID NO: 162 - RNA, 21 nt, synthetic construct
  source 1..21: mol_type = other RNA
cgattgtccagagactggtgt

SEQ ID NO: 163 - RNA, 21 nt, synthetic construct
  source 1..21: mol_type = other RNA
gattgtccagagactggtgat

SEQ ID NO: 164 - RNA, 21 nt, synthetic construct
  source 1..21: mol_type = other RNA
tgtccagagactggtgacatt

SEQ ID NO: 165 - RNA, 21 nt, synthetic construct
  source 1..21: mol_type = other RNA
cagagactggtgacatggctt

SEQ ID NO: 166 - RNA, 21 nt, synthetic construct
  source 1..21: mol_type = other RNA
agagactggtgacatggcttt

SEQ ID NO: 167 - RNA, 21 nt, synthetic construct
  source 1..21: mol_type = other RNA
actggtgacatggcttccagt

SEQ ID NO: 168 - RNA, 21 nt, synthetic construct
  source 1..21: mol_type = other RNA
ctggtgacatggcttccagat

SEQ ID NO: 169 - RNA, 21 nt, synthetic construct
  source 1..21: mol_type = other RNA
gtgacatggcttccagatatt

SEQ ID NO: 170 - RNA, 21 nt, synthetic construct
  source 1..21: mol_type = other RNA
tgacatggcttccagatatgt

SEQ ID NO: 171 - RNA, 21 nt, synthetic construct
  source 1..21: mol_type = other RNA
gacatggcttccagatatgct

SEQ ID NO: 172 - RNA, 21 nt, synthetic construct
  source 1..21: mol_type = other RNA
acatggcttccagatatgcct

SEQ ID NO: 173 - RNA, 21 nt, synthetic construct
  source 1..21: mol_type = other RNA
catggcttccagatatgccct

SEQ ID NO: 174 - RNA, 21 nt, synthetic construct
  source 1..21: mol_type = other RNA
atggcttccagatatgcccgt

SEQ ID NO: 175 - RNA, 21 nt, synthetic construct
  source 1..21: mol_type = other RNA
gcttccagatatgcccgacgt

SEQ ID NO: 176 - RNA, 21 nt, synthetic construct
  source 1..21: mol_type = other RNA
gcagtgggtgacctcacaggt

SEQ ID NO: 177 - RNA, 21 nt, synthetic construct
  source 1..21: mol_type = other RNA
cctccaggtcccaaatgccat

SEQ ID NO: 178 - RNA, 21 nt, synthetic construct
  source 1..21: mol_type = other RNA
ctccaggtcccaaatgccagt

SEQ ID NO: 179 - RNA, 21 nt, synthetic construct
  source 1..21: mol_type = other RNA
aggtcccaaatgccagtgagt

SEQ ID NO: 180 - RNA, 21 nt, synthetic construct
  source 1..21: mol_type = other RNA
gtcccaaatgccagtgagcat

SEQ ID NO: 181 - RNA, 21 nt, synthetic construct
  source 1..21: mol_type = other RNA
cctcaggtccagcctgaactt

SEQ ID NO: 182 - RNA, 21 nt, synthetic construct
  source 1..21: mol_type = other RNA
tcaggtccagcctgaacttct

SEQ ID NO: 183 - RNA, 21 nt, synthetic construct
  source 1..21: mol_type = other RNA
caggtccagcctgaacttctt

SEQ ID NO: 184 - RNA, 21 nt, synthetic construct
  source 1..21: mol_type = other RNA
aggtccagcctgaacttcttt

SEQ ID NO: 185 - RNA, 21 nt, synthetic construct
  source 1..21: mol_type = other RNA
ggtccagcctgaacttcttct

SEQ ID NO: 186 - RNA, 21 nt, synthetic construct
  source 1..21: mol_type = other RNA
ttgggcaataaagtacctgct

SEQ ID NO: 187 - RNA, 21 nt, synthetic construct
  source 1..21: mol_type = other RNA
ggcaataaagtacctgctggt

SEQ ID NO: 188 - RNA, 21 nt, synthetic construct
  source 1..21: mol_type = other RNA
aataaagtacctgctggtgct

SEQ ID NO: 189 - RNA, 21 nt, synthetic construct
  source 1..21: mol_type = other RNA
aaagtacctgctggtgctgat

SEQ ID NO: 190 - RNA, 21 nt, synthetic construct
  source 1..21: mol_type = other RNA
acttgaggaggcgagtctagt

SEQ ID NO: 191 - RNA, 21 nt, synthetic construct
  source 1..21: mol_type = other RNA
gtttcccatctttgtgcagct

SEQ ID NO: 192 - RNA, 21 nt, synthetic construct
  source 1..21: mol_type = other RNA
tcccatctttgtgcagctact

SEQ ID NO: 193 - RNA, 21 nt, synthetic construct
  source 1..21: mol_type = other RNA
catctttgtgcagctacctct

SEQ ID NO: 194 - RNA, 21 nt, synthetic construct
  source 1..21: mol_type = other RNA
tgtgcagctacctccgcattt

SEQ ID NO: 195 - RNA, 21 nt, synthetic construct
  source 1..21: mol_type = other RNA
tgcagctacctccgcattgct

SEQ ID NO: 196 - RNA, 21 nt, synthetic construct
  source 1..21: mol_type = other RNA
tgcctgtgacgtggaggatct

SEQ ID NO: 197 - RNA, 21 nt, synthetic construct
  source 1..21: mol_type = other RNA
cagcctctgagctgagttggt

SEQ ID NO: 198 - RNA, 21 nt, synthetic construct
  source 1..21: mol_type = other RNA
agcctctgagctgagttggtt

SEQ ID NO: 199 - RNA, 21 nt, synthetic construct
  source 1..21: mol_type = other RNA
gcctctgagctgagttggttt

SEQ ID NO: 200 - RNA, 21 nt, synthetic construct
  source 1..21: mol_type = other RNA
cctctgagctgagttggtttt

SEQ ID NO: 201 - RNA, 21 nt, synthetic construct
  source 1..21: mol_type = other RNA
ctctgagctgagttggttttt

SEQ ID NO: 202 - RNA, 21 nt, synthetic construct
  source 1..21: mol_type = other RNA
tctgagctgagttggttttat

SEQ ID NO: 203 - RNA, 21 nt, synthetic construct
  source 1..21: mol_type = other RNA
ctgagctgagttggttttatt

SEQ ID NO: 204 - RNA, 21 nt, synthetic construct
  source 1..21: mol_type = other RNA
tgagctgagttggttttatgt

SEQ ID NO: 205 - RNA, 21 nt, synthetic construct
  source 1..21: mol_type = other RNA
gagctgagttggttttatgat

SEQ ID NO: 206 - RNA, 21 nt, synthetic construct
  source 1..21: mol_type = other RNA
agctgagttggttttatgaat

SEQ ID NO: 207 - RNA, 21 nt, synthetic construct
  source 1..21: mol_type = other RNA
gctgagttggttttatgaaat

SEQ ID NO: 208 - RNA, 21 nt, synthetic construct
  source 1..21: mol_type = other RNA
ctgagttggttttatgaaaat

SEQ ID NO: 209 - RNA, 21 nt, synthetic construct
  source 1..21: mol_type = other RNA
gagttggttttatgaaaagct

SEQ ID NO: 210 - RNA, 21 nt, synthetic construct
  source 1..21: mol_type = other RNA
agttggttttatgaaaagctt

SEQ ID NO: 211 - RNA, 21 nt, synthetic construct
  source 1..21: mol_type = other RNA
gttggttttatgaaaagctat

SEQ ID NO: 212 - RNA, 21 nt, synthetic construct
  source 1..21: mol_type = other RNA
ttggttttatgaaaagctagt

SEQ ID NO: 213 - RNA, 21 nt, synthetic construct
  source 1..21: mol_type = other RNA
tggttttatgaaaagctaggt

SEQ ID NO: 214 - RNA, 21 nt, synthetic construct
  source 1..21: mol_type = other RNA
gttttatgaaaagctaggaat

SEQ ID NO: 215 - RNA, 21 nt, synthetic construct
  source 1..21: mol_type = other RNA
ttttatgaaaagctaggaagt

SEQ ID NO: 216 - RNA, 21 nt, synthetic construct
  source 1..21: mol_type = other RNA
tatgaaaagctaggaagcaat

SEQ ID NO: 217 - RNA, 21 nt, synthetic construct
  source 1..21: mol_type = other RNA
attcagctggttgggaaatgt

SEQ ID NO: 218 - RNA, 21 nt, synthetic construct
  source 1..21: mol_type = other RNA
cagctggttgggaaatgacat

SEQ ID NO: 219 - RNA, 21 nt, synthetic construct
  source 1..21: mol_type = other RNA
agctggttgggaaatgacact

SEQ ID NO: 220 - RNA, 21 nt, synthetic construct
  source 1..21: mol_type = other RNA
gtgcagagggtcccttactgt

SEQ ID NO: 221 - RNA, 21 nt, synthetic construct
  source 1..21: mol_type = other RNA
tgcagagggtcccttactgat

SEQ ID NO: 222 - RNA, 21 nt, synthetic construct
  source 1..21: mol_type = other RNA
gcagagggtcccttactgact

SEQ ID NO: 223 - RNA, 21 nt, synthetic construct
  source 1..21: mol_type = other RNA
ttaatggtcagactgttccat

SEQ ID NO: 224 - RNA, 21 nt, synthetic construct
  source 1..21: mol_type = other RNA
taatggtcagactgttccagt

SEQ ID NO: 225 - RNA, 21 nt, synthetic construct
  source 1..21: mol_type = other RNA
acgacactgcctgtcaggtgt

SEQ ID NO: 226 - RNA, 21 nt, synthetic construct
  source 1..21: mol_type = other RNA
acacctttttcacctaactat

SEQ ID NO: 227 - RNA, 21 nt, synthetic construct
  source 1..21: mol_type = other RNA
cacctttttcacctaactaat

SEQ ID NO: 228 - RNA, 21 nt, synthetic construct
  source 1..21: mol_type = other RNA
acctttttcacctaactaaat

SEQ ID NO: 229 - RNA, 21 nt, synthetic construct
  source 1..21: mol_type = other RNA
ctttttcacctaactaaaatt

SEQ ID NO: 230 - RNA, 21 nt, synthetic construct
  source 1..21: mol_type = other RNA
tttttcacctaactaaaatat

SEQ ID NO: 231 - RNA, 21 nt, synthetic construct
  source 1..21: mol_type = other RNA
ttttcacctaactaaaataat

SEQ ID NO: 232 - RNA, 21 nt, synthetic construct
  source 1..21: mol_type = other RNA
tttcacctaactaaaataatt

SEQ ID NO: 233 - RNA, 21 nt, synthetic construct
  source 1..21: mol_type = other RNA
ttcacctaactaaaataatgt

SEQ ID NO: 234 - RNA, 21 nt, synthetic construct
  source 1..21: mol_type = other RNA
tcacctaactaaaataatgtt

SEQ ID NO: 235 - RNA, 21 nt, synthetic construct
  source 1..21: mol_type = other RNA
cacctaactaaaataatgttt

SEQ ID NO: 236 - RNA, 21 nt, synthetic construct
  source 1..21: mol_type = other RNA
acctaactaaaataatgtttt

SEQ ID NO: 237 - RNA, 21 nt, synthetic construct
  source 1..21: mol_type = other RNA
cctaactaaaataatgtttat

SEQ ID NO: 238 - RNA, 21 nt, synthetic construct
  source 1..21: mol_type = other RNA
ctaactaaaataatgtttaat

SEQ ID NO: 239 - RNA, 21 nt, synthetic construct
  source 1..21: mol_type = other RNA
taactaaaataatgtttaaat

SEQ ID NO: 240 - RNA, 21 nt, synthetic construct
  source 1..21: mol_type = other RNA
aactaaaataatgtttaaagt

SEQ ID NO: 241 - RNA, 21 nt, synthetic construct
  source 1..21: mol_type = other RNA
actaaaataatgtttaaagat

SEQ ID NO: 242 - RNA, 21 nt, synthetic construct
  source 1..21: mol_type = other RNA
acctgttgaattttgtattat

SEQ ID NO: 243 - RNA, 21 nt, synthetic construct
  source 1..21: mol_type = other RNA
cctgttgaattttgtattatt

SEQ ID NO: 244 - RNA, 21 nt, synthetic construct
  source 1..21: mol_type = other RNA
tgcggcttcctgggcttctat

SEQ ID NO: 245 - RNA, 21 nt, synthetic construct
  source 1..21: mol_type = other RNA
ttcctgggcttctaccacgtt

SEQ ID NO: 246 - RNA, 21 nt, synthetic construct
  source 1..21: mol_type = other RNA
cccgctggagcagactctgct

SEQ ID NO: 247 - RNA, 21 nt, synthetic construct
  source 1..21: mol_type = other RNA
cagactctgcaggtcctctct

SEQ ID NO: 248 - RNA, 21 nt, synthetic construct
  source 1..21: mol_type = other RNA
actctgcaggtcctctcagat

SEQ ID NO: 249 - RNA, 21 nt, synthetic construct
  source 1..21: mol_type = other RNA
tctgcaggtcctctcagatct

SEQ ID NO: 250 - RNA, 21 nt, synthetic construct
  source 1..21: mol_type = other RNA
catcttccatccatccttcat

SEQ ID NO: 251 - RNA, 21 nt, synthetic construct
  source 1..21: mol_type = other RNA
tacagtggccttatccctcct

SEQ ID NO: 252 - RNA, 21 nt, synthetic construct
  source 1..21: mol_type = other RNA
cagtggccttatccctccttt

SEQ ID NO: 253 - RNA, 21 nt, synthetic construct
  source 1..21: mol_type = other RNA
gtggccttatccctccttcct

SEQ ID NO: 254 - RNA, 21 nt, synthetic construct
  source 1..21: mol_type = other RNA
tgagtgacaacgtacccttct

SEQ ID NO: 255 - RNA, 21 nt, synthetic construct
  source 1..21: mol_type = other RNA
gagtgacaacgtacccttcat

SEQ ID NO: 256 - RNA, 21 nt, synthetic construct
  source 1..21: mol_type = other RNA
acgtacccttcattgatgcct

SEQ ID NO: 257 - RNA, 21 nt, synthetic construct
  source 1..21: mol_type = other RNA
agtacgacatctgccctaaat

SEQ ID NO: 258 - RNA, 21 nt, synthetic construct
  source 1..21: mol_type = other RNA
atctgccctaaagtcaagtct

SEQ ID NO: 259 - RNA, 21 nt, synthetic construct
  source 1..21: mol_type = other RNA
ctctgcacagggaacctctat

SEQ ID NO: 260 - RNA, 21 nt, synthetic construct
  source 1..21: mol_type = other RNA
tctgcacagggaacctctact

SEQ ID NO: 261 - RNA, 21 nt, synthetic construct
  source 1..21: mol_type = other RNA
acagggaacctctaccttctt

SEQ ID NO: 262 - RNA, 21 nt, synthetic construct
  source 1..21: mol_type = other RNA
ctgggagagatatgccttcgt

SEQ ID NO: 263 - RNA, 21 nt, synthetic construct
  source 1..21: mol_type = other RNA
agagatatgccttcgaggatt

SEQ ID NO: 264 - RNA, 21 nt, synthetic construct
  source 1..21: mol_type = other RNA
agatatgccttcgaggatatt

SEQ ID NO: 265 - RNA, 21 nt, synthetic construct
  source 1..21: mol_type = other RNA
gaagagaagggcatctgcaat

SEQ ID NO: 266 - RNA, 21 nt, synthetic construct
  source 1..21: mol_type = other RNA
gagctgctagaccacctgcgt

SEQ ID NO: 267 - RNA, 21 nt, synthetic construct
  source 1..21: mol_type = other RNA
gaccacctgcgtctcagcatt

SEQ ID NO: 268 - RNA, 21 nt, synthetic construct
  source 1..21: mol_type = other RNA
cacctgcgtctcagcatcctt

SEQ ID NO: 269 - RNA, 21 nt, synthetic construct
  source 1..21: mol_type = other RNA
ccctgggatgagagcatcctt

SEQ ID NO: 270 - RNA, 21 nt, synthetic construct
  source 1..21: mol_type = other RNA
aggtggatacatgagcaagat

SEQ ID NO: 271 - RNA, 21 nt, synthetic construct
  source 1..21: mol_type = other RNA
ggtggatacatgagcaagatt

SEQ ID NO: 272 - RNA, 21 nt, synthetic construct
  source 1..21: mol_type = other RNA
catgagcaagatttgcaactt

SEQ ID NO: 273 - RNA, 21 nt, synthetic construct
  source 1..21: mol_type = other RNA
atgagcaagatttgcaacttt

SEQ ID NO: 274 - RNA, 21 nt, synthetic construct
  source 1..21: mol_type = other RNA
tttgcaacttgctacccattt

SEQ ID NO: 275 - RNA, 21 nt, synthetic construct
  source 1..21: mol_type = other RNA
atgctgccctgtaccctgcct

SEQ ID NO: 276 - RNA, 21 nt, synthetic construct
  source 1..21: mol_type = other RNA
gccattgcgattgtccagagt

SEQ ID NO: 277 - RNA, 21 nt, synthetic construct
  source 1..21: mol_type = other RNA
ccattgcgattgtccagagat

SEQ ID NO: 278 - RNA, 21 nt, synthetic construct
  source 1..21: mol_type = other RNA
attgcgattgtccagagactt

SEQ ID NO: 279 - RNA, 21 nt, synthetic construct
  source 1..21: mol_type = other RNA
ccagagactggtgacatggct

SEQ ID NO: 280 - RNA, 21 nt, synthetic construct
  source 1..21: mol_type = other RNA
gactggtgacatggcttccat

SEQ ID NO: 281 - RNA, 21 nt, synthetic construct
  source 1..21: mol_type = other RNA
tggtgacatggcttccagatt

SEQ ID NO: 282 - RNA, 21 nt, synthetic construct
  source 1..21: mol_type = other RNA
ggtgacatggcttccagatat

SEQ ID NO: 283 - RNA, 21 nt, synthetic construct
  source 1..21: mol_type = other RNA
tggcttccagatatgcccgat

SEQ ID NO: 284 - RNA, 21 nt, synthetic construct
  source 1..21: mol_type = other RNA
ggcttccagatatgcccgact

SEQ ID NO: 285 - RNA, 21 nt, synthetic construct
  source 1..21: mol_type = other RNA
gttgcagtgggtgacctcact

SEQ ID NO: 286 - RNA, 21 nt, synthetic construct
  source 1..21: mol_type = other RNA
ccaggtcccaaatgccagtgt

SEQ ID NO: 287 - RNA, 21 nt, synthetic construct
  source 1..21: mol_type = other RNA
gctctccacctttcccagttt

SEQ ID NO: 288 - RNA, 21 nt, synthetic construct
  source 1..21: mol_type = other RNA
attctttcagaggtgctaaat

SEQ ID NO: 289 - RNA, 21 nt, synthetic construct
  source 1..21: mol_type = other RNA
ttcccatctttgtgcagctat

SEQ ID NO: 290 - RNA, 21 nt, synthetic construct
  source 1..21: mol_type = other RNA
gacgtggaggatcccagcctt

SEQ ID NO: 291 - RNA, 21 nt, synthetic construct
  source 1..21: mol_type = other RNA
tggaggatcccagcctctgat

SEQ ID NO: 292 - RNA, 21 nt, synthetic construct
  source 1..21: mol_type = other RNA
tgagttggttttatgaaaagt

SEQ ID NO: 293 - RNA, 21 nt, synthetic construct
  source 1..21: mol_type = other RNA
ggttttatgaaaagctaggat

SEQ ID NO: 294 - RNA, 21 nt, synthetic construct
  source 1..21: mol_type = other RNA
tttatgaaaagctaggaagct

SEQ ID NO: 295 - RNA, 21 nt, synthetic construct
  source 1..21: mol_type = other RNA
ttatgaaaagctaggaagcat

SEQ ID NO: 296 - RNA, 21 nt, synthetic construct
  source 1..21: mol_type = other RNA
aattcagctggttgggaaatt

SEQ ID NO: 297 - RNA, 21 nt, synthetic construct
  source 1..21: mol_type = other RNA
cagagggtcccttactgactt

SEQ ID NO: 298 - RNA, 21 nt, synthetic construct
  source 1..21: mol_type = other RNA
tattaatggtcagactgttct

SEQ ID NO: 299 - RNA, 21 nt, synthetic construct
  source 1..21: mol_type = other RNA
aacacctttttcacctaactt

SEQ ID NO: 300 - RNA, 21 nt, synthetic construct
  source 1..21: mol_type = other RNA
cctttttcacctaactaaaat

SEQ ID NO: 301 - RNA, 23 nt, synthetic construct
  source 1..23: mol_type = other RNA
aaaggacaagctccagccgcgct

SEQ ID NO: 302 - RNA, 23 nt, synthetic construct
  source 1..23: mol_type = other RNA
agtagaagcccaggaagccgcag

SEQ ID NO: 303 - RNA, 23 nt, synthetic construct
  source 1..23: mol_type = other RNA
aggtagaagcccaggaagccgca

SEQ ID NO: 304 - RNA, 23 nt, synthetic construct
  source 1..23: mol_type = other RNA
  modified_base 7: mod_base = OTHER; note = 5'-methyluridine-3'-phosphate
acgtggtagaagcccaggaagcc

SEQ ID NO: 305 - RNA, 23 nt, synthetic construct
  source 1..23: mol_type = other RNA
acgacgtggtagaagcccaggaa

SEQ ID NO: 306 - RNA, 23 nt, synthetic construct
  source 1..23: mol_type = other RNA
accgacgtggtagaagcccagga

SEQ ID NO: 307 - RNA, 23 nt, synthetic construct
  source 1..23: mol_type = other RNA
aaacaacatgcgcgcgtcgcgga

SEQ ID NO: 308 - RNA, 23 nt, synthetic construct
  source 1..23: mol_type = other RNA
atgcagagtctgctccagcggga

SEQ ID NO: 309 - RNA, 23 nt, synthetic construct
  source 1..23: mol_type = other RNA
  modified_base 7: mod_base = OTHER; note = 5'-methyluridine-3'-phosphate
aggacctgcagagtctgctccag

SEQ ID NO: 310 - RNA, 23 nt, synthetic construct
  source 1..23: mol_type = other RNA
actgagaggacctgcagagtctg

SEQ ID NO: 311 - RNA, 23 nt, synthetic construct
  source 1..23: mol_type = other RNA
  modified_base 5: mod_base = OTHER; note = 5'-methyluridine-3'-phosphate
aatctgagaggacctgcagagtc

SEQ ID NO: 312 - RNA, 23 nt, synthetic construct
  source 1..23: mol_type = other RNA
  modified_base 5: mod_base = OTHER; note = 5'-methyluridine-3'-phosphate
  modified_base 7: mod_base = OTHER; note = 5'-methyluridine-3'-phosphate
aagatctgagaggacctgcagag

SEQ ID NO: 313 - RNA, 23 nt, synthetic construct
  source 1..23: mol_type = other RNA
aaagatctgagaggacctgcaga

SEQ ID NO: 314 - RNA, 23 nt, synthetic construct
  source 1..23: mol_type = other RNA
acaagatctgagaggacctgcag

SEQ ID NO: 315 - RNA, 23 nt, synthetic construct
  source 1..23: mol_type = other RNA
  modified_base 7: mod_base = OTHER; note = 5'-methyluridine-3'-phosphate
aaatgttccgactcctggccttc

SEQ ID NO: 316 - RNA, 23 nt, synthetic construct
  source 1..23: mol_type = other RNA
  modified_base 5: mod_base = OTHER; note = 5'-methyluridine-3'-phosphate
  modified_base 7: mod_base = OTHER; note = 5'-methyluridine-3'-phosphate
acaatgttccgactcctggcctt

SEQ ID NO: 317 - RNA, 23 nt, synthetic construct
  source 1..23: mol_type = other RNA
accaatgttccgactcctggcct

SEQ ID NO: 318 - RNA, 23 nt, synthetic construct
  source 1..23: mol_type = other RNA
agaaggatggatggaagatgcca

SEQ ID NO: 319 - RNA, 23 nt, synthetic construct
  source 1..23: mol_type = other RNA
atggacattggccgggaggcatt

SEQ ID NO: 320 - RNA, 23 nt, synthetic construct
  source 1..23: mol_type = other RNA
  modified_base 5: mod_base = OTHER; note = 5'-methyluridine-3'-phosphate
aagatgagctggtggacattggc

SEQ ID NO: 321 - RNA, 23 nt, synthetic construct
  source 1..23: mol_type = other RNA
agagatgagctggtggacattgg

SEQ ID NO: 322 - RNA, 23 nt, synthetic construct
  source 1..23: mol_type = other RNA
accacgacttcgtctttggaccg

SEQ ID NO: 323 - RNA, 23 nt, synthetic construct
  source 1..23: mol_type = other RNA
atccacgacttcgtctttggacc

SEQ ID NO: 324 - RNA, 23 nt, synthetic construct
  source 1..23: mol_type = other RNA
aatccacgacttcgtctttggac

SEQ ID NO: 325 - RNA, 23 nt, synthetic construct
  source 1..23: mol_type = other RNA
acatccacgacttcgtctttgga

SEQ ID NO: 326 - RNA, 23 nt, synthetic construct
  source 1..23: mol_type = other RNA
  modified_base 7: mod_base = OTHER; note = 5'-methyluridine-3'-phosphate
aaggcatccacgacttcgtcttt

SEQ ID NO: 327 - RNA, 23 nt, synthetic construct
  source 1..23: mol_type = other RNA
aggataaggccactgtagaaggg

SEQ ID NO: 328 - RNA, 23 nt, synthetic construct
  source 1..23: mol_type = other RNA
agggataaggccactgtagaagg

SEQ ID NO: 329 - RNA, 23 nt, synthetic construct
  source 1..23: mol_type = other RNA
aagggataaggccactgtagaag

SEQ ID NO: 330 - RNA, 23 nt, synthetic construct
  source 1..23: mol_type = other RNA
agagggataaggccactgtagaa

SEQ ID NO: 331 - RNA, 23 nt, synthetic construct
  source 1..23: mol_type = other RNA
agaaggagggataaggccactgt

SEQ ID NO: 332 - RNA, 23 nt, synthetic construct
  source 1..23: mol_type = other RNA
aaggaaggagggataaggccact

SEQ ID NO: 333 - RNA, 23 nt, synthetic construct
  source 1..23: mol_type = other RNA
actgaaggaaggagggataaggc

SEQ ID NO: 334 - RNA, 23 nt, synthetic construct
  source 1..23: mol_type = other RNA
atctgaaggaaggagggataagg

SEQ ID NO: 335 - RNA, 23 nt, synthetic construct
  source 1..23: mol_type = other RNA
acgcctctgaaggaaggagggat

SEQ ID NO: 336 - RNA, 23 nt, synthetic construct
  source 1..23: mol_type = other RNA
aacgcctctgaaggaaggaggga

SEQ ID NO: 337 - RNA, 23 nt, synthetic construct
  source 1..23: mol_type = other RNA
  modified_base 7: mod_base = OTHER; note = 5'-methyluridine-3'-phosphate
aacgcctctgaaggaaggaggga

SEQ ID NO: 338 - RNA, 23 nt, synthetic construct
  source 1..23: mol_type = other RNA
acgcacgcctctgaaggaaggag

SEQ ID NO: 339 - RNA, 23 nt, synthetic construct
  source 1..23: mol_type = other RNA
atatcgcacgcctctgaaggaag

SEQ ID NO: 340 - RNA, 23 nt, synthetic construct
  source 1..23: mol_type = other RNA
acatatcgcacgcctctgaagga

SEQ ID NO: 341 - RNA, 23 nt, synthetic construct
  source 1..23: mol_type = other RNA
aacatatcgcacgcctctgaagg

SEQ ID NO: 342 - RNA, 23 nt, synthetic construct
  source 1..23: mol_type = other RNA
acacatatcgcacgcctctgaag

SEQ ID NO: 343 - RNA, 23 nt, synthetic construct
  source 1..23: mol_type = other RNA
accacatatcgcacgcctctgaa

SEQ ID NO: 344 - RNA, 23 nt, synthetic construct
  source 1..23: mol_type = other RNA
atccacatatcgcacgcctctga

SEQ ID NO: 345 - RNA, 23 nt, synthetic construct
  source 1..23: mol_type = other RNA
acatccacatatcgcacgcctct

SEQ ID NO: 346 - RNA, 23 nt, synthetic construct
  source 1..23: mol_type = other RNA
accatccacatatcgcacgcctc

SEQ ID NO: 347 - RNA, 23 nt, synthetic construct
  source 1..23: mol_type = other RNA
actccatccacatatcgcacgcc

SEQ ID NO: 348 - RNA, 23 nt, synthetic construct
  source 1..23: mol_type = other RNA
acctccatccacatatcgcacgc

SEQ ID NO: 349 - RNA, 23 nt, synthetic construct
  source 1..23: mol_type = other RNA
  modified_base 7: mod_base = OTHER; note = 5'-methyluridine-3'-phosphate
aaagggtacgttgtcactcactc

SEQ ID NO: 350 - RNA, 23 nt, synthetic construct
  source 1..23: mol_type = other RNA
aatgaagggtacgttgtcactca

SEQ ID NO: 351 - RNA, 23 nt, synthetic construct
  source 1..23: mol_type = other RNA
aaatgaagggtacgttgtcactc

SEQ ID NO: 352 - RNA, 23 nt, synthetic construct
  source 1..23: mol_type = other RNA
acaatgaagggtacgttgtcact

SEQ ID NO: 353 - RNA, 23 nt, synthetic construct
  source 1..23: mol_type = other RNA
atcaatgaagggtacgttgtcac

SEQ ID NO: 354 - RNA, 23 nt, synthetic construct
  source 1..23: mol_type = other RNA
aatcaatgaagggtacgttgtca

SEQ ID NO: 355 - RNA, 23 nt, synthetic construct
  source 1..23: mol_type = other RNA
acatcaatgaagggtacgttgtc

SEQ ID NO: 356 - RNA, 23 nt, synthetic construct
  source 1..23: mol_type = other RNA
agcatcaatgaagggtacgttgt

SEQ ID NO: 357 - RNA, 23 nt, synthetic construct
  source 1..23: mol_type = other RNA
  modified_base 7: mod_base = OTHER; note = 5'-methyluridine-3'-phosphate
atggcatcaatgaagggtacgtt

SEQ ID NO: 358 - RNA, 23 nt, synthetic construct
  source 1..23: mol_type = other RNA
attggcatcaatgaagggtacgt

SEQ ID NO: 359 - RNA, 23 nt, synthetic construct
  source 1..23: mol_type = other RNA
aactttagggcagatgtcgtact

SEQ ID NO: 360 - RNA, 23 nt, synthetic construct
  source 1..23: mol_type = other RNA
atgactttagggcagatgtcgta

SEQ ID NO: 361 - RNA, 23 nt, synthetic construct
  source 1..23: mol_type = other RNA
  modified_base 7: mod_base = OTHER; note = 5'-methyluridine-3'-phosphate
attgactttagggcagatgtcgt

SEQ ID NO: 362 - RNA, 23 nt, synthetic construct
  source 1..23: mol_type = other RNA
acttgactttagggcagatgtcg

SEQ ID NO: 363 - RNA, 23 nt, synthetic construct
  source 1..23: mol_type = other RNA
aggacttgactttagggcagatg

SEQ ID NO: 364 - RNA, 23 nt, synthetic construct
  source 1..23: mol_type = other RNA
  modified_base 7: mod_base = OTHER; note = 5'-methyluridine-3'-phosphate
aggacttgactttagggcagatg

SEQ ID NO: 365 - RNA, 23 nt, synthetic construct
  source 1..23: mol_type = other RNA
  modified_base 7: mod_base = OTHER; note = 5'-methyluridine-3'-phosphate
atggacttgactttagggcagat

SEQ ID NO: 366 - RNA, 23 nt, synthetic construct
  source 1..23: mol_type = other RNA
agagcttggtgatgtccacatga

SEQ ID NO: 367 - RNA, 23 nt, synthetic construct
  source 1..23: mol_type = other RNA
  modified_base 7: mod_base = OTHER; note = 5'-methyluridine-3'-phosphate
agagcttggtgatgtccacatga

SEQ ID NO: 368 - RNA, 23 nt, synthetic construct
  source 1..23: mol_type = other RNA
  modified_base 7: mod_base = OTHER; note = 5'-methyluridine-3'-phosphate
atgagcttggtgatgtccacatg

SEQ ID NO: 369 - RNA, 23 nt, synthetic construct
  source 1..23: mol_type = other RNA
  modified_base 5: mod_base = OTHER; note = 5'-methyluridine-3'-phosphate
  modified_base 7: mod_base = OTHER; note = 5'-methyluridine-3'-phosphate
accctgtgcagaggcgtagactg

SEQ ID NO: 370 - RNA, 23 nt, synthetic construct
  source 1..23: mol_type = other RNA
  modified_base 7: mod_base = OTHER; note = 5'-methyluridine-3'-phosphate
aagaggttccctgtgcagaggcg

SEQ ID NO: 371 - RNA, 23 nt, synthetic construct
  source 1..23: mol_type = other RNA
aaggtagaggttccctgtgcaga

SEQ ID NO: 372 - RNA, 23 nt, synthetic construct
  source 1..23: mol_type = other RNA
aaaggtagaggttccctgtgcag

SEQ ID NO: 373 - RNA, 23 nt, synthetic construct
  source 1..23: mol_type = other RNA
  modified_base 7: mod_base = OTHER; note = 5'-methyluridine-3'-phosphate
agaaggtagaggttccctgtgca

SEQ ID NO: 374 - RNA, 23 nt, synthetic construct
  source 1..23: mol_type = other RNA
agagaaggtagaggttccctgtg

SEQ ID NO: 375 - RNA, 23 nt, synthetic construct
  source 1..23: mol_type = other RNA
aagagaaggtagaggttccctgt

SEQ ID NO: 376 - RNA, 23 nt, synthetic construct
  source 1..23: mol_type = other RNA
agagagaaggtagaggttccctg

SEQ ID NO: 377 - RNA, 23 nt, synthetic construct
  source 1..23: mol_type = other RNA
  modified_base 5: mod_base = OTHER; note = 5'-methyluridine-3'-phosphate
  modified_base 7: mod_base = OTHER; note = 5'-methyluridine-3'-phosphate
aatatctctcccagcaccttgag

SEQ ID NO: 378 - RNA, 23 nt, synthetic construct
  source 1..23: mol_type = other RNA
acatatctctcccagcaccttga

SEQ ID NO: 379 - RNA, 23 nt, synthetic construct
  source 1..23: mol_type = other RNA
agcatatctctcccagcaccttg

SEQ ID NO: 380 - RNA, 23 nt, synthetic construct
  source 1..23: mol_type = other RNA
aggcatatctctcccagcacctt

SEQ ID NO: 381 - RNA, 23 nt, synthetic construct
  source 1..23: mol_type = other RNA
  modified_base 7: mod_base = OTHER; note = 5'-methyluridine-3'-phosphate
aaggcatatctctcccagcacct

SEQ ID NO: 382 - RNA, 23 nt, synthetic construct
  source 1..23: mol_type = other RNA
aaaggcatatctctcccagcacc

SEQ ID NO: 383 - RNA, 23 nt, synthetic construct
  source 1..23: mol_type = other RNA
atcgaaggcatatctctcccagc

SEQ ID NO: 384 - RNA, 23 nt, synthetic construct
  source 1..23: mol_type = other RNA
actcgaaggcatatctctcccag

SEQ ID NO: 385 - RNA, 23 nt, synthetic construct
  source 1..23: mol_type = other RNA
acctcgaaggcatatctctccca

SEQ ID NO: 386 - RNA, 23 nt, synthetic construct
  source 1..23: mol_type = other RNA
atcctcgaaggcatatctctccc

SEQ ID NO: 387 - RNA, 23 nt, synthetic construct
  source 1..23: mol_type = other RNA
  modified_base 7: mod_base = OTHER; note = 5'-methyluridine-3'-phosphate
atatcctcgaaggcatatctctc

SEQ ID NO: 388 - RNA, 23 nt, synthetic construct
  source 1..23: mol_type = other RNA
aaatatcctcgaaggcatatctc

SEQ ID NO: 389 - RNA, 23 nt, synthetic construct
  source 1..23: mol_type = other RNA
aaaatatcctcgaaggcatatct

SEQ ID NO: 390 - RNA, 23 nt, synthetic construct
  source 1..23: mol_type = other RNA
acaaatatcctcgaaggcatatc

SEQ ID NO: 391 - RNA, 23 nt, synthetic construct
  source 1..23: mol_type = other RNA
accaaatatcctcgaaggcatat

SEQ ID NO: 392 - RNA, 23 nt, synthetic construct
  source 1..23: mol_type = other RNA
atccaaatatcctcgaaggcata

SEQ ID NO: 393 - RNA, 23 nt, synthetic construct
  source 1..23: mol_type = other RNA
actcttccaagaacctgaatgca

SEQ ID NO: 394 - RNA, 23 nt, synthetic construct
  source 1..23: mol_type = other RNA
acccttctcttccaagaacctga

SEQ ID NO: 395 - RNA, 23 nt, synthetic construct
  source 1..23: mol_type = other RNA
agcccttctcttccaagaacctg

SEQ ID NO: 396 - RNA, 23 nt, synthetic construct
  source 1..23: mol_type = other RNA
  modified_base 7: mod_base = OTHER; note = 5'-methyluridine-3'-phosphate
agcccttctcttccaagaacctg

SEQ ID NO: 397 - RNA, 23 nt, synthetic construct
  source 1..23: mol_type = other RNA
  modified_base 7: mod_base = OTHER; note = 5'-methyluridine-3'-phosphate
atgcccttctcttccaagaacct

SEQ ID NO: 398 - RNA, 23 nt, synthetic construct
  source 1..23: mol_type = other RNA
agttgcagatgcccttctcttcc

SEQ ID NO: 399 - RNA, 23 nt, synthetic construct
  source 1..23: mol_type = other RNA
  modified_base 5: mod_base = OTHER; note = 5'-methyluridine-3'-phosphate
attctgaggatgacttcaggcct

SEQ ID NO: 400 - RNA, 23 nt, synthetic construct
  source 1..23: mol_type = other RNA
accttctgaggatgacttcaggc

SEQ ID NO: 401 - RNA, 23 nt, synthetic construct
  source 1..23: mol_type = other RNA
acccttctgaggatgacttcagg

SEQ ID NO: 402 - RNA, 23 nt, synthetic construct
  source 1..23: mol_type = other RNA
atcccttctgaggatgacttcag

SEQ ID NO: 403 - RNA, 23 nt, synthetic construct
  source 1..23: mol_type = other RNA
aatcccttctgaggatgacttca

SEQ ID NO: 404 - RNA, 23 nt, synthetic construct
  source 1..23: mol_type = other RNA
  modified_base 7: mod_base = OTHER; note = 5'-methyluridine-3'-phosphate
aatcccttctgaggatgacttca

SEQ ID NO: 405 - RNA, 23 nt, synthetic construct
  source 1..23: mol_type = other RNA
acatcccttctgaggatgacttc

SEQ ID NO: 406 - RNA, 23 nt, synthetic construct
  source 1..23: mol_type = other RNA
atccatcccttctgaggatgact

SEQ ID NO: 407 - RNA, 23 nt, synthetic construct
  source 1..23: mol_type = other RNA
aggtctagcagctcatctccctc

SEQ ID NO: 408 - RNA, 23 nt, synthetic construct
  source 1..23: mol_type = other RNA
  modified_base 5: mod_base = OTHER; note = 5'-methyluridine-3'-phosphate
  modified_base 7: mod_base = OTHER; note = 5'-methyluridine-3'-phosphate
atggtctagcagctcatctccct

SEQ ID NO: 409 - RNA, 23 nt, synthetic construct
  source 1..23: mol_type = other RNA
  modified_base 7: mod_base = OTHER; note = 5'-methyluridine-3'-phosphate
aggtggtctagcagctcatctcc

SEQ ID NO: 410 - RNA, 23 nt, synthetic construct
  source 1..23: mol_type = other RNA
aagacgcaggtggtctagcagct

SEQ ID NO: 411 - RNA, 23 nt, synthetic construct
  source 1..23: mol_type = other RNA
actgagacgcaggtggtctagca

SEQ ID NO: 412 - RNA, 23 nt, synthetic construct
  source 1..23: mol_type = other RNA
  modified_base 7: mod_base = OTHER; note = 5'-methyluridine-3'-phosphate
agatgctgagacgcaggtggtct

SEQ ID NO: 413 - RNA, 23 nt, synthetic construct
  source 1..23: mol_type = other RNA
aagggcaggatgctgagacgcag

SEQ ID NO: 414 - RNA, 23 nt, synthetic construct
  source 1..23: mol_type = other RNA
actcatcccagggcaggatgctg

SEQ ID NO: 415 - RNA, 23 nt, synthetic construct
  source 1..23: mol_type = other RNA
  modified_base 7: mod_base = OTHER; note = 5'-methyluridine-3'-phosphate
atctcatcccagggcaggatgct

SEQ ID NO: 416 - RNA, 23 nt, synthetic construct
  source 1..23: mol_type = other RNA
  modified_base 5: mod_base = OTHER; note = 5'-methyluridine-3'-phosphate
actctcatcccagggcaggatgc

SEQ ID NO: 417 - RNA, 23 nt, synthetic construct
  source 1..23: mol_type = other RNA
  modified_base 7: mod_base = OTHER; note = 5'-methyluridine-3'-phosphate
agatgctctcatcccagggcagg

SEQ ID NO: 418 - RNA, 23 nt, synthetic construct
  source 1..23: mol_type = other RNA
acaggatgctctcatcccagggc

SEQ ID NO: 419 - RNA, 23 nt, synthetic construct
  source 1..23: mol_type = other RNA
aatccacctttgtctttcatttc

SEQ ID NO: 420 - RNA, 23 nt, synthetic construct
  source 1..23: mol_type = other RNA
atatccacctttgtctttcattt

SEQ ID NO: 421 - RNA, 23 nt, synthetic construct
  source 1..23: mol_type = other RNA
  modified_base 5: mod_base = OTHER; note = 5'-methyluridine-3'-phosphate
  modified_base 7: mod_base = OTHER; note = 5'-methyluridine-3'-phosphate
atcatgtatccacctttgtcttt

SEQ ID NO: 422 - RNA, 23 nt, synthetic construct
  source 1..23: mol_type = other RNA
agctcatgtatccacctttgtct

SEQ ID NO: 423 - RNA, 23 nt, synthetic construct
  source 1..23: mol_type = other RNA
  modified_base 5: mod_base = OTHER; note = 5'-methyluridine-3'-phosphate
atgctcatgtatccacctttgtc

SEQ ID NO: 424 - RNA, 23 nt, synthetic construct
  source 1..23: mol_type = other RNA
  modified_base 7: mod_base = OTHER; note = 5'-methyluridine-3'-phosphate
acttgctcatgtatccacctttg

SEQ ID NO: 425 - RNA, 23 nt, synthetic construct
  source 1..23: mol_type = other RNA
acaaatcttgctcatgtatccac

SEQ ID NO: 426 - RNA, 23 nt, synthetic construct
  source 1..23: mol_type = other RNA
agcaaatcttgctcatgtatcca

SEQ ID NO: 427 - RNA, 23 nt, synthetic construct
  source 1..23: mol_type = other RNA
atgcaaatcttgctcatgtatcc

SEQ ID NO: 428 - RNA, 23 nt, synthetic construct
  source 1..23: mol_type = other RNA
attgcaaatcttgctcatgtatc

SEQ ID NO: 429 - RNA, 23 nt, synthetic construct
  source 1..23: mol_type = other RNA
agttgcaaatcttgctcatgtat

SEQ ID NO: 430 - RNA, 23 nt, synthetic construct
  source 1..23: mol_type = other RNA
acaagttgcaaatcttgctcatg

SEQ ID NO: 431 - RNA, 23 nt, synthetic construct
  source 1..23: mol_type = other RNA
  modified_base 7: mod_base = OTHER; note = 5'-methyluridine-3'-phosphate
agcaagttgcaaatcttgctcat

SEQ ID NO: 432 - RNA, 23 nt, synthetic construct
  source 1..23: mol_type = other RNA
aagcaagttgcaaatcttgctca

SEQ ID NO: 433 - RNA, 23 nt, synthetic construct
  source 1..23: mol_type = other RNA
atagcaagttgcaaatcttgctc

SEQ ID NO: 434 - RNA, 23 nt, synthetic construct
  source 1..23: mol_type = other RNA
actaatgggtagcaagttgcaaa

SEQ ID NO: 435 - RNA, 23 nt, synthetic construct
  source 1..23: mol_type = other RNA
acctaatgggtagcaagttgcaa

SEQ ID NO: 436 - RNA, 23 nt, synthetic construct
  source 1..23: mol_type = other RNA
atcctaatgggtagcaagttgca

SEQ ID NO: 437 - RNA, 23 nt, synthetic construct
  source 1..23: mol_type = other RNA
aatcctaatgggtagcaagttgc

SEQ ID NO: 438 - RNA, 23 nt, synthetic construct
  source 1..23: mol_type = other RNA
  modified_base 7: mod_base = OTHER; note = 5'-methyluridine-3'-phosphate
atatcctaatgggtagcaagttg

SEQ ID NO: 439 - RNA, 23 nt, synthetic construct
  source 1..23: mol_type = other RNA
acaggcagggtacagggcagcat

SEQ ID NO: 440 - RNA, 23 nt, synthetic construct
  source 1..23: mol_type = other RNA
atccacaggcagggtacagggca

SEQ ID NO: 441 - RNA, 23 nt, synthetic construct
  source 1..23: mol_type = other RNA
agacaatcgcaatggcagattcc

SEQ ID NO: 442 - RNA, 23 nt, synthetic construct
  source 1..23: mol_type = other RNA
actggacaatcgcaatggcagat

SEQ ID NO: 443 - RNA, 23 nt, synthetic construct
  source 1..23: mol_type = other RNA
atctggacaatcgcaatggcaga

SEQ ID NO: 444 - RNA, 23 nt, synthetic construct
  source 1..23: mol_type = other RNA
  modified_base 5: mod_base = OTHER; note = 5'-methyluridine-3'-phosphate
  modified_base 7: mod_base = OTHER; note = 5'-methyluridine-3'-phosphate
agtctctggacaatcgcaatggc

SEQ ID NO: 445 - RNA, 23 nt, synthetic construct
  source 1..23: mol_type = other RNA
acagtctctggacaatcgcaatg

SEQ ID NO: 446 - RNA, 23 nt, synthetic construct
  source 1..23: mol_type = other RNA
  modified_base 5: mod_base = OTHER; note = 5'-methyluridine-3'-phosphate
  modified_base 7: mod_base = OTHER; note = 5'-methyluridine-3'-phosphate
acagtctctggacaatcgcaatg

SEQ ID NO: 447 - RNA, 23 nt, synthetic construct
  source 1..23: mol_type = other RNA
accagtctctggacaatcgcaat

SEQ ID NO: 448 - RNA, 23 nt, synthetic construct
  source 1..23: mol_type = other RNA
  modified_base 7: mod_base = OTHER; note = 5'-methyluridine-3'-phosphate
aaccagtctctggacaatcgcaa

SEQ ID NO: 449 - RNA, 23 nt, synthetic construct
  source 1..23: mol_type = other RNA
acaccagtctctggacaatcgca

SEQ ID NO: 450 - RNA, 23 nt, synthetic construct
  source 1..23: mol_type = other RNA
atcaccagtctctggacaatcgc

SEQ ID NO: 451 - RNA, 23 nt, synthetic construct
  source 1..23: mol_type = other RNA
  modified_base 5: mod_base = OTHER; note = 5'-methyluridine-3'-phosphate
aatgtcaccagtctctggacaat

SEQ ID NO: 452 - RNA, 23 nt, synthetic construct
  source 1..23: mol_type = other RNA
aagccatgtcaccagtctctgga

SEQ ID NO: 453 - RNA, 23 nt, synthetic construct
  source 1..23: mol_type = other RNA
aaagccatgtcaccagtctctgg

SEQ ID NO: 454 - RNA, 23 nt, synthetic construct
  source 1..23: mol_type = other RNA
actggaagccatgtcaccagtct

SEQ ID NO: 455 - RNA, 23 nt, synthetic construct
  source 1..23: mol_type = other RNA
atctggaagccatgtcaccagtc

SEQ ID NO: 456 - RNA, 23 nt, synthetic construct
  source 1..23: mol_type = other RNA
  modified_base 5: mod_base = OTHER; note = 5'-methyluridine-3'-phosphate
  modified_base 7: mod_base = OTHER; note = 5'-methyluridine-3'-phosphate
aatatctggaagccatgtcacca

SEQ ID NO: 457 - RNA, 23 nt, synthetic construct
  source 1..23: mol_type = other RNA
acatatctggaagccatgtcacc

SEQ ID NO: 458 - RNA, 23 nt, synthetic construct
  source 1..23: mol_type = other RNA
agcatatctggaagccatgtcac

SEQ ID NO: 459 - RNA, 23 nt, synthetic construct
  source 1..23: mol_type = other RNA
aggcatatctggaagccatgtca

SEQ ID NO: 460 - RNA, 23 nt, synthetic construct
  source 1..23: mol_type = other RNA
  modified_base 7: mod_base = OTHER; note = 5'-methyluridine-3'-phosphate
agggcatatctggaagccatgtc

SEQ ID NO: 461 - RNA, 23 nt, synthetic construct
  source 1..23: mol_type = other RNA
acgggcatatctggaagccatgt

SEQ ID NO: 462 - RNA, 23 nt, synthetic construct
  source 1..23: mol_type = other RNA
acgtcgggcatatctggaagcca

SEQ ID NO: 463 - RNA, 23 nt, synthetic construct
  source 1..23: mol_type = other RNA
acctgtgaggtcacccactgcaa

SEQ ID NO: 464 - RNA, 23 nt, synthetic construct
  source 1..23: mol_type = other RNA
  modified_base 7: mod_base = OTHER; note = 5'-methyluridine-3'-phosphate
atggcatttgggacctggaggcg

SEQ ID NO: 465 - RNA, 23 nt, synthetic construct
  source 1..23: mol_type = other RNA
actggcatttgggacctggaggc

SEQ ID NO: 466 - RNA, 23 nt, synthetic construct
  source 1..23: mol_type = other RNA
actcactggcatttgggacctgg

SEQ ID NO: 467 - RNA, 23 nt, synthetic construct
  source 1..23: mol_type = other RNA
  modified_base 5: mod_base = OTHER; note = 5'-methyluridine-3'-phosphate
atgctcactggcatttgggacct

SEQ ID NO: 468 - RNA, 23 nt, synthetic construct
  source 1..23: mol_type = other RNA
  modified_base 5: mod_base = OTHER; note = 5'-methyluridine-3'-phosphate
aagttcaggctggacctgaggat

SEQ ID NO: 469 - RNA, 23 nt, synthetic construct
  source 1..23: mol_type = other RNA
agaagttcaggctggacctgagg

SEQ ID NO: 470 - RNA, 23 nt, synthetic construct
  source 1..23: mol_type = other RNA
  modified_base 7: mod_base = OTHER; note = 5'-methyluridine-3'-phosphate
agaagttcaggctggacctgagg

SEQ ID NO: 471 - RNA, 23 nt, synthetic construct
  source 1..23: mol_type = other RNA
  modified_base 7: mod_base = OTHER; note = 5'-methyluridine-3'-phosphate
aagaagttcaggctggacctgag

SEQ ID NO: 472 - RNA, 23 nt, synthetic construct
  source 1..23: mol_type = other RNA
aaagaagttcaggctggacctga

SEQ ID NO: 473 - RNA, 23 nt, synthetic construct
  source 1..23: mol_type = other RNA
agaagaagttcaggctggacctg

SEQ ID NO: 474 - RNA, 23 nt, synthetic construct
  source 1..23: mol_type = other RNA
  modified_base 7: mod_base = OTHER; note = 5'-methyluridine-3'-phosphate
agcaggtactttattgcccaaga

SEQ ID NO: 475 - RNA, 23 nt, synthetic construct
  source 1..23: mol_type = other RNA
accagcaggtactttattgccca

SEQ ID NO: 476 - RNA, 23 nt, synthetic construct
  source 1..23: mol_type = other RNA
agcaccagcaggtactttattgc

SEQ ID NO: 477 - RNA, 23 nt, synthetic construct
  source 1..23: mol_type = other RNA
atcagcaccagcaggtactttat

SEQ ID NO: 478 - RNA, 23 nt, synthetic construct
  source 1..23: mol_type = other RNA
actagactcgcctcctcaagtga

SEQ ID NO: 479 - RNA, 23 nt, synthetic construct
  source 1..23: mol_type = other RNA
agctgcacaaagatgggaaactt

SEQ ID NO: 480 - RNA, 23 nt, synthetic construct
  source 1..23: mol_type = other RNA
  modified_base 7: mod_base = OTHER; note = 5'-methyluridine-3'-phosphate
agtagctgcacaaagatgggaaa

SEQ ID NO: 481 - RNA, 23 nt, synthetic construct
  source 1..23: mol_type = other RNA
agaggtagctgcacaaagatggg

SEQ ID NO: 482 - RNA, 23 nt, synthetic construct
  source 1..23: mol_type = other RNA
aaatgcggaggtagctgcacaaa

SEQ ID NO: 483 - RNA, 23 nt, synthetic construct
  source 1..23: mol_type = other RNA
agcaatgcggaggtagctgcaca

SEQ ID NO: 484 - RNA, 23 nt, synthetic construct
  source 1..23: mol_type = other RNA
  modified_base 7: mod_base = OTHER; note = 5'-methyluridine-3'-phosphate
agatcctccacgtcacaggcagg

SEQ ID NO: 485 - RNA, 23 nt, synthetic construct
  source 1..23: mol_type = other RNA
accaactcagctcagaggctggg

SEQ ID NO: 486 - RNA, 23 nt, synthetic construct
  source 1..23: mol_type = other RNA
aaccaactcagctcagaggctgg

SEQ ID NO: 487 - RNA, 23 nt, synthetic construct
  source 1..23: mol_type = other RNA
aaaccaactcagctcagaggctg

SEQ ID NO: 488 - RNA, 23 nt, synthetic construct
  source 1..23: mol_type = other RNA
aaaaccaactcagctcagaggct

SEQ ID NO: 489 - RNA, 23 nt, synthetic construct
  source 1..23: mol_type = other RNA
aaaaaccaactcagctcagaggc

SEQ ID NO: 490 - RNA, 23 nt, synthetic construct
  source 1..23: mol_type = other RNA
ataaaaccaactcagctcagagg

SEQ ID NO: 491 - RNA, 23 nt, synthetic construct
  source 1..23: mol_type = other RNA
aataaaaccaactcagctcagag

SEQ ID NO: 492 - RNA, 23 nt, synthetic construct
  source 1..23: mol_type = other RNA
acataaaaccaactcagctcaga

SEQ ID NO: 493 - RNA, 23 nt, synthetic construct
  source 1..23: mol_type = other RNA
atcataaaaccaactcagctcag

SEQ ID NO: 494 - RNA, 23 nt, synthetic construct
  source 1..23: mol_type = other RNA
attcataaaaccaactcagctca

SEQ ID NO: 495 - RNA, 23 nt, synthetic construct
  source 1..23: mol_type = other RNA
  modified_base 7: mod_base = OTHER; note = 5'-methyluridine-3'-phosphate
atttcataaaaccaactcagctc

SEQ ID NO: 496 - RNA, 23 nt, synthetic construct
  source 1..23: mol_type = other RNA
  modified_base 5: mod_base = OTHER; note = 5'-methyluridine-3'-phosphate
attttcataaaaccaactcagct

SEQ ID NO: 497 - RNA, 23 nt, synthetic construct
  source 1..23: mol_type = other RNA
agcttttcataaaaccaactcag

SEQ ID NO: 498 - RNA, 23 nt, synthetic construct
  source 1..23: mol_type = other RNA
aagcttttcataaaaccaactca

SEQ ID NO: 499 - RNA, 23 nt, synthetic construct
  source 1..23: mol_type = other RNA
  modified_base 7: mod_base = OTHER; note = 5'-methyluridine-3'-phosphate
atagcttttcataaaaccaactc

SEQ ID NO: 500 - RNA, 23 nt, synthetic construct
  source 1..23: mol_type = other RNA
actagcttttcataaaaccaact

SEQ ID NO: 501 - RNA, 23 nt, synthetic construct
  source 1..23: mol_type = other RNA
  modified_base 7: mod_base = OTHER; note = 5'-methyluridine-3'-phosphate
actagcttttcataaaaccaact

SEQ ID NO: 502 - RNA, 23 nt, synthetic construct
  source 1..23: mol_type = other RNA
acctagcttttcataaaaccaac

SEQ ID NO: 503 - RNA, 23 nt, synthetic construct
  source 1..23: mol_type = other RNA
attcctagcttttcataaaacca

SEQ ID NO: 504 - RNA, 23 nt, synthetic construct
  source 1..23: mol_type = other RNA
acttcctagcttttcataaaacc

SEQ ID NO: 505 - RNA, 23 nt, synthetic construct
  source 1..23: mol_type = other RNA
  modified_base 7: mod_base = OTHER; note = 5'-methyluridine-3'-phosphate
acttcctagcttttcataaaacc

SEQ ID NO: 506 - RNA, 23 nt, synthetic construct
  source 1..23: mol_type = other RNA
  modified_base 7: mod_base = OTHER; note = 5'-methyluridine-3'-phosphate
attgcttcctagcttttcataaa

SEQ ID NO: 507 - RNA, 23 nt, synthetic construct
  source 1..23: mol_type = other RNA
acatttcccaaccagctgaatta

SEQ ID NO: 508 - RNA, 23 nt, synthetic construct
  source 1..23: mol_type = other RNA
  modified_base 7: mod_base = OTHER; note = 5'-methyluridine-3'-phosphate
atgtcatttcccaaccagctgaa

SEQ ID NO: 509 - RNA, 23 nt, synthetic construct
  source 1..23: mol_type = other RNA
  modified_base 5: mod_base = OTHER; note = 5'-methyluridine-3'-phosphate
agtgtcatttcccaaccagctga

SEQ ID NO: 510 - RNA, 23 nt, synthetic construct
  source 1..23: mol_type = other RNA
acagtaagggaccctctgcactg

SEQ ID NO: 511 - RNA, 23 nt, synthetic construct
  source 1..23: mol_type = other RNA
atcagtaagggaccctctgcact

SEQ ID NO: 512 - RNA, 23 nt, synthetic construct
  source 1..23: mol_type = other RNA
  modified_base 7: mod_base = OTHER; note = 5'-methyluridine-3'-phosphate
agtcagtaagggaccctctgcac

SEQ ID NO: 513 - RNA, 23 nt, synthetic construct
  source 1..23: mol_type = other RNA
atggaacagtctgaccattaata

SEQ ID NO: 514 - RNA, 23 nt, synthetic construct
  source 1..23: mol_type = other RNA
actggaacagtctgaccattaat

SEQ ID NO: 515 - RNA, 23 nt, synthetic construct
  source 1..23: mol_type = other RNA
acacctgacaggcagtgtcgttc

SEQ ID NO: 516 - RNA, 23 nt, synthetic construct
  source 1..23: mol_type = other RNA
atagttaggtgaaaaaggtgttc

SEQ ID NO: 517 - RNA, 23 nt, synthetic construct
  source 1..23: mol_type = other RNA
  modified_base 7: mod_base = OTHER; note = 5'-methyluridine-3'-phosphate
attagttaggtgaaaaaggtgtt

SEQ ID NO: 518 - RNA, 23 nt, synthetic construct
  source 1..23: mol_type = other RNA
  modified_base 7: mod_base = OTHER; note = 5'-methyluridine-3'-phosphate
atttagttaggtgaaaaaggtgt

SEQ ID NO: 519 - RNA, 23 nt, synthetic construct
  source 1..23: mol_type = other RNA
aattttagttaggtgaaaaaggt

SEQ ID NO: 520 - RNA, 23 nt, synthetic construct
  source 1..23: mol_type = other RNA
atattttagttaggtgaaaaagg

SEQ ID NO: 521 - RNA, 23 nt, synthetic construct
  source 1..23: mol_type = other RNA
attattttagttaggtgaaaaag

SEQ ID NO: 522 - RNA, 23 nt, synthetic construct
  source 1..23: mol_type = other RNA
aattattttagttaggtgaaaaa

SEQ ID NO: 523 - RNA, 23 nt, synthetic construct
  source 1..23: mol_type = other RNA
acattattttagttaggtgaaaa

SEQ ID NO: 524 - RNA, 23 nt, synthetic construct
  source 1..23: mol_type = other RNA
aacattattttagttaggtgaaa

SEQ ID NO: 525 - RNA, 23 nt, synthetic construct
  source 1..23: mol_type = other RNA
aaacattattttagttaggtgaa

SEQ ID NO: 526 - RNA, 23 nt, synthetic construct
  source 1..23: mol_type = other RNA
aaaacattattttagttaggtga

SEQ ID NO: 527 - RNA, 23 nt, synthetic construct
  source 1..23: mol_type = other RNA
ataaacattattttagttaggtg

SEQ ID NO: 528 - RNA, 23 nt, synthetic construct
  source 1..23: mol_type = other RNA
attaaacattattttagttaggt

SEQ ID NO: 529 - RNA, 23 nt, synthetic construct
  source 1..23: mol_type = other RNA
atttaaacattattttagttagg

SEQ ID NO: 530 - RNA, 23 nt, synthetic construct
  source 1..23: mol_type = other RNA
actttaaacattattttagttag

SEQ ID NO: 531 - RNA, 23 nt, synthetic construct
  source 1..23: mol_type = other RNA
atctttaaacattattttagtta

SEQ ID NO: 532 - RNA, 23 nt, synthetic construct
  source 1..23: mol_type = other RNA
ataatacaaaattcaacaggtaa

SEQ ID NO: 533 - RNA, 23 nt, synthetic construct
  source 1..23: mol_type = other RNA
aataatacaaaattcaacaggta

SEQ ID NO: 534 - RNA, 23 nt, synthetic construct
  source 1..23: mol_type = other RNA
atagaagcccaggaagccgcagc

SEQ ID NO: 535 - RNA, 23 nt, synthetic construct
  source 1..23: mol_type = other RNA
  modified_base 5: mod_base = OTHER; note = 5'-methyluridine-3'-phosphate
aacgtggtagaagcccaggaagc

SEQ ID NO: 536 - RNA, 23 nt, synthetic construct
  source 1..23: mol_type = other RNA
agcagagtctgctccagcgggat

SEQ ID NO: 537 - RNA, 23 nt, synthetic construct
  source 1..23: mol_type = other RNA
agagaggacctgcagagtctgct

SEQ ID NO: 538 - RNA, 23 nt, synthetic construct
  source 1..23: mol_type = other RNA
atctgagaggacctgcagagtct

SEQ ID NO: 539 - RNA, 23 nt, synthetic construct
  source 1..23: mol_type = other RNA
agatctgagaggacctgcagagt

SEQ ID NO: 540 - RNA, 23 nt, synthetic construct
  source 1..23: mol_type = other RNA
atgaaggatggatggaagatgcc

SEQ ID NO: 541 - RNA, 23 nt, synthetic construct
  source 1..23: mol_type = other RNA
aggagggataaggccactgtaga

SEQ ID NO: 542 - RNA, 23 nt, synthetic construct
  source 1..23: mol_type = other RNA
aaaggagggataaggccactgta

SEQ ID NO: 543 - RNA, 23 nt, synthetic construct
  source 1..23: mol_type = other RNA
aggaaggagggataaggccactg

SEQ ID NO: 544 - RNA, 23 nt, synthetic construct
  source 1..23: mol_type = other RNA
agaagggtacgttgtcactcact

SEQ ID NO: 545 - RNA, 23 nt, synthetic construct
  source 1..23: mol_type = other RNA
atgaagggtacgttgtcactcac

SEQ ID NO: 546 - RNA, 23 nt, synthetic construct
  source 1..23: mol_type = other RNA
aggcatcaatgaagggtacgttg

SEQ ID NO: 547 - RNA, 23 nt, synthetic construct
  source 1..23: mol_type = other RNA
atttagggcagatgtcgtactcc

SEQ ID NO: 548 - RNA, 23 nt, synthetic construct
  source 1..23: mol_type = other RNA
  modified_base 5: mod_base = OTHER; note = 5'-methyluridine-3'-phosphate
agacttgactttagggcagatgt

SEQ ID NO: 549 - RNA, 23 nt, synthetic construct
  source 1..23: mol_type = other RNA
atagaggttccctgtgcagaggc

SEQ ID NO: 550 - RNA, 23 nt, synthetic construct
  source 1..23: mol_type = other RNA
agtagaggttccctgtgcagagg

SEQ ID NO: 551 - RNA, 23 nt, synthetic construct
  source 1..23: mol_type = other RNA
aagaaggtagaggttccctgtgc

SEQ ID NO: 552 - RNA, 23 nt, synthetic construct
  source 1..23: mol_type = other RNA
acgaaggcatatctctcccagca

SEQ ID NO: 553 - RNA, 23 nt, synthetic construct
  source 1..23: mol_type = other RNA
aatcctcgaaggcatatctctcc

SEQ ID NO: 554 - RNA, 23 nt, synthetic construct
  source 1..23: mol_type = other RNA
  modified_base 5: mod_base = OTHER; note = 5'-methyluridine-3'-phosphate
aatatcctcgaaggcatatctct

SEQ ID NO: 555 - RNA, 23 nt, synthetic construct
  source 1..23: mol_type = other RNA
attgcagatgcccttctcttcca

SEQ ID NO: 556 - RNA, 23 nt, synthetic construct
  source 1..23: mol_type = other RNA
acgcaggtggtctagcagctcat

SEQ ID NO: 557 - RNA, 23 nt, synthetic construct
  source 1..23: mol_type = other RNA
aatgctgagacgcaggtggtcta

SEQ ID NO: 558 - RNA, 23 nt, synthetic construct
  source 1..23: mol_type = other RNA
aaggatgctgagacgcaggtggt

SEQ ID NO: 559 - RNA, 23 nt, synthetic construct
  source 1..23: mol_type = other RNA
aaggatgctctcatcccagggca

SEQ ID NO: 560 - RNA, 23 nt, synthetic construct
  source 1..23: mol_type = other RNA
  modified_base 5: mod_base = OTHER; note = 5'-methyluridine-3'-phosphate
atcttgctcatgtatccaccttt

SEQ ID NO: 561 - RNA, 23 nt, synthetic construct
  source 1..23: mol_type = other RNA
  modified_base 5: mod_base = OTHER; note = 5'-methyluridine-3'-phosphate
aatcttgctcatgtatccacctt

SEQ ID NO: 562 - RNA, 23 nt, synthetic construct
  source 1..23: mol_type = other RNA
  modified_base 5: mod_base = OTHER; note = 5'-methyluridine-3'-phosphate
aagttgcaaatcttgctcatgta

SEQ ID NO: 563 - RNA, 23 nt, synthetic construct
  source 1..23: mol_type = other RNA
  modified_base 5: mod_base = OTHER; note = 5'-methyluridine-3'-phosphate
aaagttgcaaatcttgctcatgt

SEQ ID NO: 564 - RNA, 23 nt, synthetic construct
  source 1..23: mol_type = other RNA
aaatgggtagcaagttgcaaatc

SEQ ID NO: 565 - RNA, 23 nt, synthetic construct
  source 1..23: mol_type = other RNA
aggcagggtacagggcagcatta

SEQ ID NO: 566 - RNA, 23 nt, synthetic construct
  source 1..23: mol_type = other RNA
  modified_base 5: mod_base = OTHER; note = 5'-methyluridine-3'-phosphate
actctggacaatcgcaatggcag

SEQ ID NO: 567 - RNA, 23 nt, synthetic construct
  source 1..23: mol_type = other RNA
atctctggacaatcgcaatggca

SEQ ID NO: 568 - RNA, 23 nt, synthetic construct
  source 1..23: mol_type = other RNA
aagtctctggacaatcgcaatgg

SEQ ID NO: 569 - RNA, 23 nt, synthetic construct
  source 1..23: mol_type = other RNA
agccatgtcaccagtctctggac

SEQ ID NO: 570 - RNA, 23 nt, synthetic construct
  source 1..23: mol_type = other RNA
atggaagccatgtcaccagtctc

SEQ ID NO: 571 - RNA, 23 nt, synthetic construct
  source 1..23: mol_type = other RNA
  modified_base 5: mod_base = OTHER; note = 5'-methyluridine-3'-phosphate
aatctggaagccatgtcaccagt

SEQ ID NO: 572 - RNA, 23 nt, synthetic construct
  source 1..23: mol_type = other RNA
atatctggaagccatgtcaccag

SEQ ID NO: 573 - RNA, 23 nt, synthetic construct
  source 1..23: mol_type = other RNA
atcgggcatatctggaagccatg

SEQ ID NO: 574 - RNA, 23 nt, synthetic construct
  source 1..23: mol_type = other RNA
agtcgggcatatctggaagccat

SEQ ID NO: 575 - RNA, 23 nt, synthetic construct
  source 1..23: mol_type = other RNA
agtgaggtcacccactgcaacca

SEQ ID NO: 576 - RNA, 23 nt, synthetic construct
  source 1..23: mol_type = other RNA
  modified_base 5: mod_base = OTHER; note = 5'-methyluridine-3'-phosphate
acactggcatttgggacctggag

SEQ ID NO: 577 - RNA, 23 nt, synthetic construct
  source 1..23: mol_type = other RNA
  modified_base 5: mod_base = OTHER; note = 5'-methyluridine-3'-phosphate
aaactgggaaaggtggagagccc

SEQ ID NO: 578 - RNA, 23 nt, synthetic construct
  source 1..23: mol_type = other RNA
atttagcacctctgaaagaatct

SEQ ID NO: 579 - RNA, 23 nt, synthetic construct
  source 1..23: mol_type = other RNA
atagctgcacaaagatgggaaac

SEQ ID NO: 580 - RNA, 23 nt, synthetic construct
  source 1..23: mol_type = other RNA
aaggctgggatcctccacgtcac

SEQ ID NO: 581 - RNA, 23 nt, synthetic construct
  source 1..23: mol_type = other RNA
atcagaggctgggatcctccacg

SEQ ID NO: 582 - RNA, 23 nt, synthetic construct
  source 1..23: mol_type = other RNA
  modified_base 5: mod_base = OTHER; note = 5'-methyluridine-3'-phosphate
acttttcataaaaccaactcagc

SEQ ID NO: 583 - RNA, 23 nt, synthetic construct
  source 1..23: mol_type = other RNA
  modified_base 5: mod_base = OTHER; note = 5'-methyluridine-3'-phosphate
atcctagcttttcataaaaccaa

SEQ ID NO: 584 - RNA, 23 nt, synthetic construct
  source 1..23: mol_type = other RNA
  modified_base 5: mod_base = OTHER; note = 5'-methyluridine-3'-phosphate
agcttcctagcttttcataaaac

SEQ ID NO: 585 - RNA, 23 nt, synthetic construct
  source 1..23: mol_type = other RNA
  modified_base 5: mod_base = OTHER; note = 5'-methyluridine-3'-phosphate
atgcttcctagcttttcataaaa

SEQ ID NO: 586 - RNA, 23 nt, synthetic construct
  source 1..23: mol_type = other RNA
  modified_base 5: mod_base = OTHER; note = 5'-methyluridine-3'-phosphate
aatttcccaaccagctgaattaa

SEQ ID NO: 587 - RNA, 23 nt, synthetic construct
  source 1..23: mol_type = other RNA
aagtcagtaagggaccctctgca

SEQ ID NO: 588 - RNA, 23 nt, synthetic construct
  source 1..23: mol_type = other RNA
agaacagtctgaccattaatagg

SEQ ID NO: 589 - RNA, 23 nt, synthetic construct
  source 1..23: mol_type = other RNA
  modified_base 5: mod_base = OTHER; note = 5'-methyluridine-3'-phosphate
aagttaggtgaaaaaggtgttct

SEQ ID NO: 590 - RNA, 23 nt, synthetic construct
  source 1..23: mol_type = other RNA
  modified_base 5: mod_base = OTHER; note = 5'-methyluridine-3'-phosphate
attttagttaggtgaaaaaggtg

SEQ ID NO: 591 - RNA, 23 nt, synthetic construct
  source 1..23: mol_type = other RNA
  modified_base 5: mod_base = OTHER; note = 5'-methyluridine-3'-phosphate
ataatacaaaattcaacaggtaa

SEQ ID NO: 592 - RNA, 21 nt, synthetic construct
  source 1..21: mol_type = other RNA
  modified_base 1: mod_base = OTHER; note = 2'-O-methylcytidine-3'-phosphorothioate
  modified_base 2: mod_base = OTHER; note = 2'-O-methylguanosine-3'-phosphorothioate
  modified_base 3: mod_base = OTHER; note = 2'-O-methylcytidine-3'-phosphate
  modified_base 4: mod_base = OTHER; note = 2'-O-methylguanosine-3'-phosphate
  modified_base 5: mod_base = OTHER; note = 2'-O-methylguanosine-3'-phosphate
  modified_base 6: mod_base = OTHER; note = 2'-O-methylcytidine-3'-phosphate
  modified_base 7: mod_base = OTHER; note = 2'-deoxy-2'-fluorouridine-3'-phosphate
  modified_base 8: mod_base = OTHER; note = 2'-O-methylguanosine-3'-phosphate
  modified_base 9: mod_base = OTHER; note = 2'-deoxy-2'-fluoroguanosine-3'-phosphate
  modified_base 10: mod_base = OTHER; note = 2'-deoxy-2'-fluoroadenosine-3'-phosphate
  modified_base 11: mod_base = OTHER; note = 2'-deoxy-2'-fluoroguanosine-3'-phosphate
  modified_base 12: mod_base = OTHER; note = 2'-O-methylcytidine-3'-phosphate
  modified_base 13: mod_base = OTHER; note = 2'-O-methyluridine-3'-phosphate
  modified_base 14: mod_base = OTHER; note = 2'-O-methyluridine-3'-phosphate
  modified_base 15: mod_base = OTHER; note = 2'-O-methylguanosine-3'-phosphate
  modified_base 16: mod_base = OTHER; note = 2'-O-methyluridine-3'-phosphate
  modified_base 17: mod_base = OTHER; note = 2'-O-methylcytidine-3'-phosphate
  modified_base 18: mod_base = OTHER; note = 2'-O-methylcytidine-3'-phosphate
  modified_base 19: mod_base = OTHER; note = 2'-O-methyluridine-3'-phosphate
  modified_base 20: mod_base = OTHER; note = 2'-O-methyluridine-3'-phosphate
  modified_base 21: mod_base = OTHER; note = 2'-O-methyluridine-3'-phosphate ((2S,4R)-1-[29-[[2-(acetylamino)-2-deoxy-beta-D-galactopyra nosyl]oxy]-14,14-bis[[3-[[3-[[5-[[2-(acetylamino)-2-deoxy-b eta-D-galactopyranosyl]oxy]-1-oxopentyl]amino]propyl]amino] -3-oxopropoxy]methyl]-1,12,19,25-tetraoxo-16-oxa-13,20,24-t riazanonacos-1-yl]-4-hydroxy-2-pyrrolidinyl)methyl ester
cgcggctggagcttgtccttt

SEQ ID NO: 593 - RNA, 21 nt, synthetic construct
  source 1..21: mol_type = other RNA
  modified_base 1: mod_base = OTHER; note = 2'-O-methylguanosine-3'-phosphorothioate
  modified_base 2: mod_base = OTHER; note = 2'-O-methylcytidine-3'-phosphorothioate
  modified_base 3: mod_base = OTHER; note = 2'-O-methylguanosine-3'-phosphate
  modified_base 4: mod_base = OTHER; note = 2'-O-methylguanosine-3'-phosphate
  modified_base 5: mod_base = OTHER; note = 2'-O-methylcytidine-3'-phosphate
  modified_base 6: mod_base = OTHER; note = 2'-O-methyluridine-3'-phosphate
  modified_base 7: mod_base = OTHER; note = 2'-deoxy-2'-fluorouridine-3'-phosphate
  modified_base 8: mod_base = OTHER; note = 2'-O-methylcytidine-3'-phosphate
  modified_base 9: mod_base = OTHER; note = 2'-deoxy-2'-fluorocytidine-3'-phosphate
  modified_base 10: mod_base = OTHER; note = 2'-deoxy-2'-fluorouridine-3'-phosphate
  modified_base 11: mod_base = OTHER; note = 2'-deoxy-2'-fluoroguanosine-3'-phosphate
  modified_base 12: mod_base = OTHER; note = 2'-O-methylguanosine-3'-phosphate
  modified_base 13: mod_base = OTHER; note = 2'-O-methylguanosine-3'-phosphate
  modified_base 14: mod_base = OTHER; note = 2'-O-methylcytidine-3'-phosphate
  modified_base 15: mod_base = OTHER; note = 2'-O-methyluridine-3'-phosphate
  modified_base 16: mod_base = OTHER; note = 2'-O-methyluridine-3'-phosphate
  modified_base 17: mod_base = OTHER; note = 2'-O-methylcytidine-3'-phosphate
  modified_base 18: mod_base = OTHER; note = 2'-O-methyluridine-3'-phosphate
  modified_base 19: mod_base = OTHER; note = 2'-O-methyladenosine-3'-phosphate
  modified_base 20: mod_base = OTHER; note = 2'-O-methylcytidine-3'-phosphate
  modified_base 21: mod_base = OTHER; note = 2'-O-methyluridine-3'-phosphate ((2S,4R)-1-[29-[[2-(acetylamino)-2-deoxy-beta-D-galactopyra nosyl]oxy]-14,14-bis[[3-[[3-[[5-[[2-(acetylamino)-2-deoxy-b eta-D-galactopyranosyl]oxy]-1-oxopentyl]amino]propyl]amino] -3-oxopropoxy]methyl]-1,12,19,25-tetraoxo-16-oxa-13,20,24-t riazanonacos-1-yl]-4-hydroxy-2-pyrrolidinyl)methyl ester
gcggcttcctgggcttctact

SEQ ID NO: 594 - RNA, 21 nt, synthetic construct
  source 1..21: mol_type = other RNA
  modified_base 1: mod_base = OTHER; note = 2'-O-methylcytidine-3'-phosphorothioate
  modified_base 2: mod_base = OTHER; note = 2'-O-methylguanosine-3'-phosphorothioate
  modified_base 3: mod_base = OTHER; note = 2'-O-methylguanosine-3'-phosphate
  modified_base 4: mod_base = OTHER; note = 2'-O-methylcytidine-3'-phosphate
  modified_base 5: mod_base = OTHER; note = 2'-O-methyluridine-3'-phosphate
  modified_base 6: mod_base = OTHER; note = 2'-O-methyluridine-3'-phosphate
  modified_base 7: mod_base = OTHER; note = 2'-deoxy-2'-fluorocytidine-3'-phosphate
  modified_base 8: mod_base = OTHER; note = 2'-O-methylcytidine-3'-phosphate
  modified_base 9: mod_base = OTHER; note = 2'-deoxy-2'-fluorouridine-3'-phosphate
  modified_base 10: mod_base = OTHER; note = 2'-deoxy-2'-fluoroguanosine-3'-phosphate
  modified_base 11: mod_base = OTHER; note = 2'-deoxy-2'-fluoroguanosine-3'-phosphate
  modified_base 12: mod_base = OTHER; note = 2'-O-methylguanosine-3'-phosphate
  modified_base 13: mod_base = OTHER; note = 2'-O-methylcytidine-3'-phosphate
  modified_base 14: mod_base = OTHER; note = 2'-O-methyluridine-3'-phosphate
  modified_base 15: mod_base = OTHER; note = 2'-O-methyluridine-3'-phosphate
  modified_base 16: mod_base = OTHER; note = 2'-O-methylcytidine-3'-phosphate
  modified_base 17: mod_base = OTHER; note = 2'-O-methyluridine-3'-phosphate
  modified_base 18: mod_base = OTHER; note = 2'-O-methyladenosine-3'-phosphate
  modified_base 19: mod_base = OTHER; note = 2'-O-methylcytidine-3'-phosphate
  modified_base 20: mod_base = OTHER; note = 2'-O-methylcytidine-3'-phosphate
  modified_base 21: mod_base = OTHER; note = 2'-O-methyluridine-3'-phosphate ((2S,4R)-1-[29-[[2-(acetylamino)-2-deoxy-beta-D-galactopyra nosyl]oxy]-14,14-bis[[3-[[3-[[5-[[2-(acetylamino)-2-deoxy-b eta-D-galactopyranosyl]oxy]-1-oxopentyl]amino]propyl]amino] -3-oxopropoxy]methyl]-1,12,19,25-tetraoxo-16-oxa-13,20,24-t riazanonacos-1-yl]-4-hydroxy-2-pyrrolidinyl)methyl ester
cggcttcctgggcttctacct

SEQ ID NO: 595 - RNA, 21 nt, synthetic construct
  source 1..21: mol_type = other RNA
  modified_base 1: mod_base = OTHER; note = 2'-O-methylcytidine-3'-phosphorothioate
  modified_base 2: mod_base = OTHER; note = 2'-O-methyluridine-3'-phosphorothioate
  modified_base 3: mod_base = OTHER; note = 2'-O-methyluridine-3'-phosphate
  modified_base 4: mod_base = OTHER; note = 2'-O-methylcytidine-3'-phosphate
  modified_base 5: mod_base = OTHER; note = 2'-O-methylcytidine-3'-phosphate
  modified_base 6: mod_base = OTHER; note = 2'-O-methyluridine-3'-phosphate
  modified_base 7: mod_base = OTHER; note = 2'-deoxy-2'-fluoroguanosine-3'-phosphate
  modified_base 8: mod_base = OTHER; note = 2'-O-methylguanosine-3'-phosphate
  modified_base 9: mod_base = OTHER; note = 2'-deoxy-2'-fluoroguanosine-3'-phosphate
  modified_base 10: mod_base = OTHER; note = 2'-deoxy-2'-fluorocytidine-3'-phosphate
  modified_base 11: mod_base = OTHER; note = 2'-deoxy-2'-fluorouridine-3'-phosphate
  modified_base 12: mod_base = OTHER; note = 2'-O-methyluridine-3'-phosphate
  modified_base 13: mod_base = OTHER; note = 2'-O-methylcytidine-3'-phosphate
  modified_base 14: mod_base = OTHER; note = 2'-O-methyluridine-3'-phosphate
  modified_base 15: mod_base = OTHER; note = 2'-O-methyladenosine-3'-phosphate
  modified_base 16: mod_base = OTHER; note = 2'-O-methylcytidine-3'-phosphate
  modified_base 17: mod_base = OTHER; note = 2'-O-methylcytidine-3'-phosphate
  modified_base 18: mod_base = OTHER; note = 2'-O-methyladenosine-3'-phosphate
  modified_base 19: mod_base = OTHER; note = 2'-O-methylcytidine-3'-phosphate
  modified_base 20: mod_base = OTHER; note = 2'-O-methylguanosine-3'-phosphate
  modified_base 21: mod_base = OTHER; note = 2'-O-methyluridine-3'-phosphate ((2S,4R)-1-[29-[[2-(acetylamino)-2-deoxy-beta-D-galactopyra nosyl]oxy]-14,14-bis[[3-[[3-[[5-[[2-(acetylamino)-2-deoxy-b eta-D-galactopyranosyl]oxy]-1-oxopentyl]amino]propyl]amino] -3-oxopropoxy]methyl]-1,12,19,25-tetraoxo-16-oxa-13,20,24-t riazanonacos-1-yl]-4-hydroxy-2-pyrrolidinyl)methyl ester
cttcctgggcttctaccacgt

SEQ ID NO: 596 - RNA, 21 nt, synthetic construct
  source 1..21: mol_type = other RNA
  modified_base 1: mod_base = OTHER; note = 2'-O-methylcytidine-3'-phosphorothioate
  modified_base 2: mod_base = OTHER; note = 2'-O-methylcytidine-3'-phosphorothioate
  modified_base 3: mod_base = OTHER; note = 2'-O-methyluridine-3'-phosphate
  modified_base 4: mod_base = OTHER; note = 2'-O-methylguanosine-3'-phosphate
  modified_base 5: mod_base = OTHER; note = 2'-O-methylguanosine-3'-phosphate
  modified_base 6: mod_base = OTHER; note = 2'-O-methylguanosine-3'-phosphate
  modified_base 7: mod_base = OTHER; note = 2'-deoxy-2'-fluorocytidine-3'-phosphate
  modified_base 8: mod_base = OTHER; note = 2'-O-methyluridine-3'-phosphate
  modified_base 9: mod_base = OTHER; note = 2'-deoxy-2'-fluorouridine-3'-phosphate
  modified_base 10: mod_base = OTHER; note = 2'-deoxy-2'-fluorocytidine-3'-phosphate
  modified_base 11: mod_base = OTHER; note = 2'-deoxy-2'-fluorouridine-3'-phosphate
  modified_base 12: mod_base = OTHER; note = 2'-O-methyladenosine-3'-phosphate
  modified_base 13: mod_base = OTHER; note = 2'-O-methylcytidine-3'-phosphate
  modified_base 14: mod_base = OTHER; note = 2'-O-methylcytidine-3'-phosphate
  modified_base 15: mod_base = OTHER; note = 2'-O-methyladenosine-3'-phosphate
  modified_base 16: mod_base = OTHER; note = 2'-O-methylcytidine-3'-phosphate
  modified_base 17: mod_base = OTHER; note = 2'-O-methylguanosine-3'-phosphate
  modified_base 18: mod_base = OTHER; note = 2'-O-methyluridine-3'-phosphate
  modified_base 19: mod_base = OTHER; note = 2'-O-methylcytidine-3'-phosphate
  modified_base 20: mod_base = OTHER; note = 2'-O-methylguanosine-3'-phosphate
  modified_base 21: mod_base = OTHER; note = 2'-O-methyluridine-3'-phosphate ((2S,4R)-1-[29-[[2-(acetylamino)-2-deoxy-beta-D-galactopyra nosyl]oxy]-14,14-bis[[3-[[3-[[5-[[2-(acetylamino)-2-deoxy-b eta-D-galactopyranosyl]oxy]-1-oxopentyl]amino]propyl]amino] -3-oxopropoxy]methyl]-1,12,19,25-tetraoxo-16-oxa-13,20,24-t riazanonacos-1-yl]-4-hydroxy-2-pyrrolidinyl)methyl ester
cctgggcttctaccacgtcgt

SEQ ID NO: 597 - RNA, 21 nt, synthetic construct
  source 1..21: mol_type = other RNA
  modified_base 1: mod_base = OTHER; note = 2'-O-methylcytidine-3'-phosphorothioate
  modified_base 2: mod_base = OTHER; note = 2'-O-methyluridine-3'-phosphorothioate
  modified_base 3: mod_base = OTHER; note = 2'-O-methylguanosine-3'-phosphate
  modified_base 4: mod_base = OTHER; note = 2'-O-methylguanosine-3'-phosphate
  modified_base 5: mod_base = OTHER; note = 2'-O-methylguanosine-3'-phosphate
  modified_base 6: mod_base = OTHER; note = 2'-O-methylcytidine-3'-phosphate
  modified_base 7: mod_base = OTHER; note = 2'-deoxy-2'-fluorouridine-3'-phosphate
  modified_base 8: mod_base = OTHER; note = 2'-O-methyluridine-3'-phosphate
  modified_base 9: mod_base = OTHER; note = 2'-deoxy-2'-fluorocytidine-3'-phosphate
  modified_base 10: mod_base = OTHER; note = 2'-deoxy-2'-fluorouridine-3'-phosphate
  modified_base 11: mod_base = OTHER; note = 2'-deoxy-2'-fluoroadenosine-3'-phosphate
  modified_base 12: mod_base = OTHER; note = 2'-O-methylcytidine-3'-phosphate
  modified_base 13: mod_base = OTHER; note = 2'-O-methylcytidine-3'-phosphate
  modified_base 14: mod_base = OTHER; note = 2'-O-methyladenosine-3'-phosphate
  modified_base 15: mod_base = OTHER; note = 2'-O-methylcytidine-3'-phosphate
  modified_base 16: mod_base = OTHER; note = 2'-O-methylguanosine-3'-phosphate
  modified_base 17: mod_base = OTHER; note = 2'-O-methyluridine-3'-phosphate
  modified_base 18: mod_base = OTHER; note = 2'-O-methylcytidine-3'-phosphate
  modified_base 19: mod_base = OTHER; note = 2'-O-methylguanosine-3'-phosphate
  modified_base 20: mod_base = OTHER; note = 2'-O-methylguanosine-3'-phosphate
  modified_base 21: mod_base = OTHER; note = 2'-O-methyluridine-3'-phosphate ((2S,4R)-1-[29-[[2-(acetylamino)-2-deoxy-beta-D-galactopyra nosyl]oxy]-14,14-bis[[3-[[3-[[5-[[2-(acetylamino)-2-deoxy-b eta-D-galactopyranosyl]oxy]-1-oxopentyl]amino]propyl]amino] -3-oxopropoxy]methyl]-1,12,19,25-tetraoxo-16-oxa-13,20,24-t riazanonacos-1-yl]-4-hydroxy-2-pyrrolidinyl)methyl ester
ctgggcttctaccacgtcggt

SEQ ID NO: 598 - RNA, 21 nt, synthetic construct
  source 1..21: mol_type = other RNA
  modified_base 1: mod_base = OTHER; note = 2'-O-methylcytidine-3'-phosphorothioate
  modified_base 2: mod_base = OTHER; note = 2'-O-methylguanosine-3'-phosphorothioate
  modified_base 3: mod_base = OTHER; note = 2'-O-methylcytidine-3'-phosphate
  modified_base 4: mod_base = OTHER; note = 2'-O-methylguanosine-3'-phosphate
  modified_base 5: mod_base = OTHER; note = 2'-O-methyladenosine-3'-phosphate
  modified_base 6: mod_base = OTHER; note = 2'-O-methylcytidine-3'-phosphate
  modified_base 7: mod_base = OTHER; note = 2'-deoxy-2'-fluoroguanosine-3'-phosphate
  modified_base 8: mod_base = OTHER; note = 2'-O-methylcytidine-3'-phosphate
  modified_base 9: mod_base = OTHER; note = 2'-deoxy-2'-fluoroguanosine-3'-phosphate
  modified_base 10: mod_base = OTHER; note = 2'-deoxy-2'-fluorocytidine-3'-phosphate
  modified_base 11: mod_base = OTHER; note = 2'-deoxy-2'-fluoroguanosine-3'-phosphate
  modified_base 12: mod_base = OTHER; note = 2'-O-methylcytidine-3'-phosphate
  modified_base 13: mod_base = OTHER; note = 2'-O-methyladenosine-3'-phosphate
  modified_base 14: mod_base = OTHER; note = 2'-O-methyluridine-3'-phosphate
  modified_base 15: mod_base = OTHER; note = 2'-O-methylguanosine-3'-phosphate
  modified_base 16: mod_base = OTHER; note = 2'-O-methyluridine-3'-phosphate
  modified_base 17: mod_base = OTHER; note = 2'-O-methyluridine-3'-phosphate
  modified_base 18: mod_base = OTHER; note = 2'-O-methylguanosine-3'-phosphate
  modified_base 19: mod_base = OTHER; note = 2'-O-methyluridine-3'-phosphate
  modified_base 20: mod_base = OTHER; note = 2'-O-methyluridine-3'-phosphate
  modified_base 21: mod_base = OTHER; note = 2'-O-methyluridine-3'-phosphate ((2S,4R)-1-[29-[[2-(acetylamino)-2-deoxy-beta-D-galactopyra nosyl]oxy]-14,14-bis[[3-[[3-[[5-[[2-(acetylamino)-2-deoxy-b eta-D-galactopyranosyl]oxy]-1-oxopentyl]amino]propyl]amino] -3-oxopropoxy]methyl]-1,12,19,25-tetraoxo-16-oxa-13,20,24-t riazanonacos-1-yl]-4-hydroxy-2-pyrrolidinyl)methyl ester
cgcgacgcgcgcatgttgttt

SEQ ID NO: 599 - RNA, 21 nt, synthetic construct
  source 1..21: mol_type = other RNA
  modified_base 1: mod_base = OTHER; note = 2'-O-methylcytidine-3'-phosphorothioate
  modified_base 2: mod_base = OTHER; note = 2'-O-methylcytidine-3'-phosphorothioate
  modified_base 3: mod_base = OTHER; note = 2'-O-methylguanosine-3'-phosphate
  modified_base 4: mod_base = OTHER; note = 2'-O-methylcytidine-3'-phosphate
  modified_base 5: mod_base = OTHER; note = 2'-O-methyluridine-3'-phosphate
  modified_base 6: mod_base = OTHER; note = 2'-O-methylguanosine-3'-phosphate
  modified_base 7: mod_base = OTHER; note = 2'-deoxy-2'-fluoroguanosine-3'-phosphate
  modified_base 8: mod_base = OTHER; note = 2'-O-methyladenosine-3'-phosphate
  modified_base 9: mod_base = OTHER; note = 2'-deoxy-2'-fluoroguanosine-3'-phosphate
  modified_base 10: mod_base = OTHER; note = 2'-deoxy-2'-fluorocytidine-3'-phosphate
  modified_base 11: mod_base = OTHER; note = 2'-deoxy-2'-fluoroadenosine-3'-phosphate
  modified_base 12: mod_base = OTHER; note = 2'-O-methylguanosine-3'-phosphate
  modified_base 13: mod_base = OTHER; note = 2'-O-methyladenosine-3'-phosphate
  modified_base 14: mod_base = OTHER; note = 2'-O-methylcytidine-3'-phosphate
  modified_base 15: mod_base = OTHER; note = 2'-O-methyluridine-3'-phosphate
  modified_base 16: mod_base = OTHER; note = 2'-O-methylcytidine-3'-phosphate
  modified_base 17: mod_base = OTHER; note = 2'-O-methyluridine-3'-phosphate
  modified_base 18: mod_base = OTHER; note = 2'-O-methylguanosine-3'-phosphate
  modified_base 19: mod_base = OTHER; note = 2'-O-methylcytidine-3'-phosphate
  modified_base 20: mod_base = OTHER; note = 2'-O-methyladenosine-3'-phosphate
  modified_base 21: mod_base = OTHER; note = 2'-O-methyluridine-3'-phosphate ((2S,4R)-1-[29-[[2-(acetylamino)-2-deoxy-beta-D-galactopyra nosyl]oxy]-14,14-bis[[3-[[3-[[5-[[2-(acetylamino)-2-deoxy-b eta-D-galactopyranosyl]oxy]-1-oxopentyl]amino]propyl]amino] -3-oxopropoxy]methyl]-1,12,19,25-tetraoxo-16-oxa-13,20,24-t riazanonacos-1-yl]-4-hydroxy-2-pyrrolidinyl)methyl ester
ccgctggagcagactctgcat

SEQ ID NO: 600 - RNA, 21 nt, synthetic construct
  source 1..21: mol_type = other RNA
  modified_base 1: mod_base = OTHER; note = 2'-O-methylguanosine-3'-phosphorothioate
  modified_base 2: mod_base = OTHER; note = 2'-O-methylguanosine-3'-phosphorothioate
  modified_base 3: mod_base = OTHER; note = 2'-O-methyladenosine-3'-phosphate
  modified_base 4: mod_base = OTHER; note = 2'-O-methylguanosine-3'-phosphate
  modified_base 5: mod_base = OTHER; note = 2'-O-methylcytidine-3'-phosphate
  modified_base 6: mod_base = OTHER; note = 2'-O-methyladenosine-3'-phosphate
  modified_base 7: mod_base = OTHER; note = 2'-deoxy-2'-fluoroguanosine-3'-phosphate
  modified_base 8: mod_base = OTHER; note = 2'-O-methyladenosine-3'-phosphate
  modified_base 9: mod_base = OTHER; note = 2'-deoxy-2'-fluorocytidine-3'-phosphate
  modified_base 10: mod_base = OTHER; note = 2'-deoxy-2'-fluorouridine-3'-phosphate
  modified_base 11: mod_base = OTHER; note = 2'-deoxy-2'-fluorocytidine-3'-phosphate
  modified_base 12: mod_base = OTHER; note = 2'-O-methyluridine-3'-phosphate
  modified_base 13: mod_base = OTHER; note = 2'-O-methylguanosine-3'-phosphate
  modified_base 14: mod_base = OTHER; note = 2'-O-methylcytidine-3'-phosphate
  modified_base 15: mod_base = OTHER; note = 2'-O-methyladenosine-3'-phosphate
  modified_base 16: mod_base = OTHER; note = 2'-O-methylguanosine-3'-phosphate
  modified_base 17: mod_base = OTHER; note = 2'-O-methylguanosine-3'-phosphate
  modified_base 18: mod_base = OTHER; note = 2'-O-methyluridine-3'-phosphate
  modified_base 19: mod_base = OTHER; note = 2'-O-methylcytidine-3'-phosphate
  modified_base 20: mod_base = OTHER; note = 2'-O-methylcytidine-3'-phosphate
  modified_base 21: mod_base = OTHER; note = 2'-O-methyluridine-3'-phosphate ((2S,4R)-1-[29-[[2-(acetylamino)-2-deoxy-beta-D-galactopyra nosyl]oxy]-14,14-bis[[3-[[3-[[5-[[2-(acetylamino)-2-deoxy-b eta-D-galactopyranosyl]oxy]-1-oxopentyl]amino]propyl]amino] -3-oxopropoxy]methyl]-1,12,19,25-tetraoxo-16-oxa-13,20,24-t riazanonacos-1-yl]-4-hydroxy-2-pyrrolidinyl)methyl ester
ggagcagactctgcaggtcct

SEQ ID NO: 601 - RNA, 21 nt, synthetic construct
  source 1..21: mol_type = other RNA
  modified_base 1: mod_base = OTHER; note = 2'-O-methylguanosine-3'-phosphorothioate
  modified_base 2: mod_base = OTHER; note = 2'-O-methyladenosine-3'-phosphorothioate
  modified_base 3: mod_base = OTHER; note = 2'-O-methylcytidine-3'-phosphate
  modified_base 4: mod_base = OTHER; note = 2'-O-methyluridine-3'-phosphate
  modified_base 5: mod_base = OTHER; note = 2'-O-methylcytidine-3'-phosphate
  modified_base 6: mod_base = OTHER; note = 2'-O-methyluridine-3'-phosphate
  modified_base 7: mod_base = OTHER; note = 2'-deoxy-2'-fluoroguanosine-3'-phosphate
  modified_base 8: mod_base = OTHER; note = 2'-O-methylcytidine-3'-phosphate
  modified_base 9: mod_base = OTHER; note = 2'-deoxy-2'-fluoroadenosine-3'-phosphate
  modified_base 10: mod_base = OTHER; note = 2'-deoxy-2'-fluoroguanosine-3'-phosphate
  modified_base 11: mod_base = OTHER; note = 2'-deoxy-2'-fluoroguanosine-3'-phosphate
  modified_base 12: mod_base = OTHER; note = 2'-O-methyluridine-3'-phosphate
  modified_base 13: mod_base = OTHER; note = 2'-O-methylcytidine-3'-phosphate
  modified_base 14: mod_base = OTHER; note = 2'-O-methylcytidine-3'-phosphate
  modified_base 15: mod_base = OTHER; note = 2'-O-methyluridine-3'-phosphate
  modified_base 16: mod_base = OTHER; note = 2'-O-methylcytidine-3'-phosphate
  modified_base 17: mod_base = OTHER; note = 2'-O-methyluridine-3'-phosphate
  modified_base 18: mod_base = OTHER; note = 2'-O-methylcytidine-3'-phosphate
  modified_base 19: mod_base = OTHER; note = 2'-O-methyladenosine-3'-phosphate
  modified_base 20: mod_base = OTHER; note = 2'-O-methylguanosine-3'-phosphate
  modified_base 21: mod_base = OTHER; note = 2'-O-methyluridine-3'-phosphate ((2S,4R)-1-[29-[[2-(acetylamino)-2-deoxy-beta-D-galactopyra nosyl]oxy]-14,14-bis[[3-[[3-[[5-[[2-(acetylamino)-2-deoxy-b eta-D-galactopyranosyl]oxy]-1-oxopentyl]amino]propyl]amino] -3-oxopropoxy]methyl]-1,12,19,25-tetraoxo-16-oxa-13,20,24-t riazanonacos-1-yl]-4-hydroxy-2-pyrrolidinyl)methyl ester
gactctgcaggtcctctcagt

SEQ ID NO: 602 - RNA, 21 nt, synthetic construct
  source 1..21: mol_type = other RNA
  modified_base 1: mod_base = OTHER; note = 2'-O-methylcytidine-3'-phosphorothioate
  modified_base 2: mod_base = OTHER; note = 2'-O-methyluridine-3'-phosphorothioate
  modified_base 3: mod_base = OTHER; note = 2'-O-methylcytidine-3'-phosphate
  modified_base 4: mod_base = OTHER; note = 2'-O-methyluridine-3'-phosphate
  modified_base 5: mod_base = OTHER; note = 2'-O-methylguanosine-3'-phosphate
  modified_base 6: mod_base = OTHER; note = 2'-O-methylcytidine-3'-phosphate
  modified_base 7: mod_base = OTHER; note = 2'-deoxy-2'-fluoroadenosine-3'-phosphate
  modified_base 8: mod_base = OTHER; note = 2'-O-methylguanosine-3'-phosphate
  modified_base 9: mod_base = OTHER; note = 2'-deoxy-2'-fluoroguanosine-3'-phosphate
  modified_base 10: mod_base = OTHER; note = 2'-deoxy-2'-fluorouridine-3'-phosphate
  modified_base 11: mod_base = OTHER; note = 2'-deoxy-2'-fluorocytidine-3'-phosphate
  modified_base 12: mod_base = OTHER; note = 2'-O-methylcytidine-3'-phosphate
  modified_base 13: mod_base = OTHER; note = 2'-O-methyluridine-3'-phosphate
  modified_base 14: mod_base = OTHER; note = 2'-O-methylcytidine-3'-phosphate
  modified_base 15: mod_base = OTHER; note = 2'-O-methyluridine-3'-phosphate
  modified_base 16: mod_base = OTHER; note = 2'-O-methylcytidine-3'-phosphate
  modified_base 17: mod_base = OTHER; note = 2'-O-methyladenosine-3'-phosphate
  modified_base 18: mod_base = OTHER; note = 2'-O-methylguanosine-3'-phosphate
  modified_base 19: mod_base = OTHER; note = 2'-O-methyladenosine-3'-phosphate
  modified_base 20: mod_base = OTHER; note = 2'-O-methyluridine-3'-phosphate
  modified_base 21: mod_base = OTHER; note = 2'-O-methyluridine-3'-phosphate ((2S,4R)-1-[29-[[2-(acetylamino)-2-deoxy-beta-D-galactopyra nosyl]oxy]-14,14-bis[[3-[[3-[[5-[[2-(acetylamino)-2-deoxy-b eta-D-galactopyranosyl]oxy]-1-oxopentyl]amino]propyl]amino] -3-oxopropoxy]methyl]-1,12,19,25-tetraoxo-16-oxa-13,20,24-t riazanonacos-1-yl]-4-hydroxy-2-pyrrolidinyl)methyl ester
ctctgcaggtcctctcagatt

SEQ ID NO: 603 - RNA, 21 nt, synthetic construct
  source 1..21: mol_type = other RNA
  modified_base 1: mod_base = OTHER; note = 2'-O-methylcytidine-3'-phosphorothioate
  modified_base 2: mod_base = OTHER; note = 2'-O-methyluridine-3'-phosphorothioate
  modified_base 3: mod_base = OTHER; note = 2'-O-methylguanosine-3'-phosphate
  modified_base 4: mod_base = OTHER; note = 2'-O-methylcytidine-3'-phosphate
  modified_base 5: mod_base = OTHER; note = 2'-O-methyladenosine-3'-phosphate
  modified_base 6: mod_base = OTHER; note = 2'-O-methylguanosine-3'-phosphate
  modified_base 7: mod_base = OTHER; note = 2'-deoxy-2'-fluoroguanosine-3'-phosphate
  modified_base 8: mod_base = OTHER; note = 2'-O-methyluridine-3'-phosphate
  modified_base 9: mod_base = OTHER; note = 2'-deoxy-2'-fluorocytidine-3'-phosphate
  modified_base 10: mod_base = OTHER; note = 2'-deoxy-2'-fluorocytidine-3'-phosphate
  modified_base 11: mod_base = OTHER; note = 2'-deoxy-2'-fluorouridine-3'-phosphate
  modified_base 12: mod_base = OTHER; note = 2'-O-methylcytidine-3'-phosphate
  modified_base 13: mod_base = OTHER; note = 2'-O-methyluridine-3'-phosphate
  modified_base 14: mod_base = OTHER; note = 2'-O-methylcytidine-3'-phosphate
  modified_base 15: mod_base = OTHER; note = 2'-O-methyladenosine-3'-phosphate
  modified_base 16: mod_base = OTHER; note = 2'-O-methylguanosine-3'-phosphate
  modified_base 17: mod_base = OTHER; note = 2'-O-methyladenosine-3'-phosphate
  modified_base 18: mod_base = OTHER; note = 2'-O-methyluridine-3'-phosphate
  modified_base 19: mod_base = OTHER; note = 2'-O-methylcytidine-3'-phosphate
  modified_base 20: mod_base = OTHER; note = 2'-O-methyluridine-3'-phosphate
  modified_base 21: mod_base = OTHER; note = 2'-O-methyluridine-3'-phosphate ((2S,4R)-1-[29-[[2-(acetylamino)-2-deoxy-beta-D-galactopyra nosyl]oxy]-14,14-bis[[3-[[3-[[5-[[2-(acetylamino)-2-deoxy-b eta-D-galactopyranosyl]oxy]-1-oxopentyl]amino]propyl]amino] -3-oxopropoxy]methyl]-1,12,19,25-tetraoxo-16-oxa-13,20,24-t riazanonacos-1-yl]-4-hydroxy-2-pyrrolidinyl)methyl ester
ctgcaggtcctctcagatctt

SEQ ID NO: 604 - RNA, 21 nt, synthetic construct
  source 1..21: mol_type = other RNA
  modified_base 1: mod_base = OTHER; note = 2'-O-methyluridine-3'-phosphorothioate
  modified_base 2: mod_base = OTHER; note = 2'-O-methylguanosine-3'-phosphorothioate
  modified_base 3: mod_base = OTHER; note = 2'-O-methylcytidine-3'-phosphate
  modified_base 4: mod_base = OTHER; note = 2'-O-methyladenosine-3'-phosphate
  modified_base 5: mod_base = OTHER; note = 2'-O-methylguanosine-3'-phosphate
  modified_base 6: mod_base = OTHER; note = 2'-O-methylguanosine-3'-phosphate
  modified_base 7: mod_base = OTHER; note = 2'-deoxy-2'-fluorouridine-3'-phosphate
  modified_base 8: mod_base = OTHER; note = 2'-O-methylcytidine-3'-phosphate
  modified_base 9: mod_base = OTHER; note = 2'-deoxy-2'-fluorocytidine-3'-phosphate
  modified_base 10: mod_base = OTHER; note = 2'-deoxy-2'-fluorouridine-3'-phosphate
  modified_base 11: mod_base = OTHER; note = 2'-deoxy-2'-fluorocytidine-3'-phosphate
  modified_base 12: mod_base = OTHER; note = 2'-O-methyluridine-3'-phosphate
  modified_base 13: mod_base = OTHER; note = 2'-O-methylcytidine-3'-phosphate
  modified_base 14: mod_base = OTHER; note = 2'-O-methyladenosine-3'-phosphate
  modified_base 15: mod_base = OTHER; note = 2'-O-methylguanosine-3'-phosphate
  modified_base 16: mod_base = OTHER; note = 2'-O-methyladenosine-3'-phosphate
  modified_base 17: mod_base = OTHER; note = 2'-O-methyluridine-3'-phosphate
  modified_base 18: mod_base = OTHER; note = 2'-O-methylcytidine-3'-phosphate
  modified_base 19: mod_base = OTHER; note = 2'-O-methyluridine-3'-phosphate
  modified_base 20: mod_base = OTHER; note = 2'-O-methyluridine-3'-phosphate
  modified_base 21: mod_base = OTHER; note = 2'-O-methyluridine-3'-phosphate ((2S,4R)-1-[29-[[2-(acetylamino)-2-deoxy-beta-D-galactopyra nosyl]oxy]-14,14-bis[[3-[[3-[[5-[[2-(acetylamino)-2-deoxy-b eta-D-galactopyranosyl]oxy]-1-oxopentyl]amino]propyl]amino] -3-oxopropoxy]methyl]-1,12,19,25-tetraoxo-16-oxa-13,20,24-t riazanonacos-1-yl]-4-hydroxy-2-pyrrolidinyl)methyl ester
tgcaggtcctctcagatcttt

SEQ ID NO: 605 - RNA, 21 nt, synthetic construct
  source 1..21: mol_type = other RNA
  modified_base 1: mod_base = OTHER; note = 2'-O-methylguanosine-3'-phosphorothioate
  modified_base 2: mod_base = OTHER; note = 2'-O-methylcytidine-3'-phosphorothioate
  modified_base 3: mod_base = OTHER; note = 2'-O-methyladenosine-3'-phosphate
  modified_base 4: mod_base = OTHER; note = 2'-O-methylguanosine-3'-phosphate
  modified_base 5: mod_base = OTHER; note = 2'-O-methylguanosine-3'-phosphate
  modified_base 6: mod_base = OTHER; note = 2'-O-methyluridine-3'-phosphate
  modified_base 7: mod_base = OTHER; note = 2'-deoxy-2'-fluorocytidine-3'-phosphate
  modified_base 8: mod_base = OTHER; note = 2'-O-methylcytidine-3'-phosphate
  modified_base 9: mod_base = OTHER; note = 2'-deoxy-2'-fluorouridine-3'-phosphate
  modified_base 10: mod_base = OTHER; note = 2'-deoxy-2'-fluorocytidine-3'-phosphate
  modified_base 11: mod_base = OTHER; note = 2'-deoxy-2'-fluorouridine-3'-phosphate
  modified_base 12: mod_base = OTHER; note = 2'-O-methylcytidine-3'-phosphate
  modified_base 13: mod_base = OTHER; note = 2'-O-methyladenosine-3'-phosphate
  modified_base 14: mod_base = OTHER; note = 2'-O-methylguanosine-3'-phosphate
  modified_base 15: mod_base = OTHER; note = 2'-O-methyladenosine-3'-phosphate
  modified_base 16: mod_base = OTHER; note = 2'-O-methyluridine-3'-phosphate
  modified_base 17: mod_base = OTHER; note = 2'-O-methylcytidine-3'-phosphate
  modified_base 18: mod_base = OTHER; note = 2'-O-methyluridine-3'-phosphate
  modified_base 19: mod_base = OTHER; note = 2'-O-methyluridine-3'-phosphate
  modified_base 20: mod_base = OTHER; note = 2'-O-methylguanosine-3'-phosphate
  modified_base 21: mod_base = OTHER; note = 2'-O-methyluridine-3'-phosphate ((2S,4R)-1-[29-[[2-(acetylamino)-2-deoxy-beta-D-galactopyra nosyl]oxy]-14,14-bis[[3-[[3-[[5-[[2-(acetylamino)-2-deoxy-b eta-D-galactopyranosyl]oxy]-1-oxopentyl]amino]propyl]amino] -3-oxopropoxy]methyl]-1,12,19,25-tetraoxo-16-oxa-13,20,24-t riazanonacos-1-yl]-4-hydroxy-2-pyrrolidinyl)methyl ester
gcaggtcctctcagatcttgt

SEQ ID NO: 606 - RNA, 21 nt, synthetic construct
  source 1..21: mol_type = other RNA
  modified_base 1: mod_base = OTHER; note = 2'-O-methyladenosine-3'-phosphorothioate
  modified_base 2: mod_base = OTHER; note = 2'-O-methylguanosine-3'-phosphorothioate
  modified_base 3: mod_base = OTHER; note = 2'-O-methylguanosine-3'-phosphate
  modified_base 4: mod_base = OTHER; note = 2'-O-methylcytidine-3'-phosphate
  modified_base 5: mod_base = OTHER; note = 2'-O-methylcytidine-3'-phosphate
  modified_base 6: mod_base = OTHER; note = 2'-O-methyladenosine-3'-phosphate
  modified_base 7: mod_base = OTHER; note = 2'-deoxy-2'-fluoroguanosine-3'-phosphate
  modified_base 8: mod_base = OTHER; note = 2'-O-methylguanosine-3'-phosphate
  modified_base 9: mod_base = OTHER; note = 2'-deoxy-2'-fluoroadenosine-3'-phosphate
  modified_base 10: mod_base = OTHER; note = 2'-deoxy-2'-fluoroguanosine-3'-phosphate
  modified_base 11: mod_base = OTHER; note = 2'-deoxy-2'-fluorouridine-3'-phosphate
  modified_base 12: mod_base = OTHER; note = 2'-O-methylcytidine-3'-phosphate
  modified_base 13: mod_base = OTHER; note = 2'-O-methylguanosine-3'-phosphate
  modified_base 14: mod_base = OTHER; note = 2'-O-methylguanosine-3'-phosphate
  modified_base 15: mod_base = OTHER; note = 2'-O-methyladenosine-3'-phosphate
  modified_base 16: mod_base = OTHER; note = 2'-O-methyladenosine-3'-phosphate
  modified_base 17: mod_base = OTHER; note = 2'-O-methylcytidine-3'-phosphate
  modified_base 18: mod_base = OTHER; note = 2'-O-methyladenosine-3'-phosphate
  modified_base 19: mod_base = OTHER; note = 2'-O-methyluridine-3'-phosphate
  modified_base 20: mod_base = OTHER; note = 2'-O-methyluridine-3'-phosphate
  modified_base 21: mod_base = OTHER; note = 2'-O-methyluridine-3'-phosphate ((2S,4R)-1-[29-[[2-(acetylamino)-2-deoxy-beta-D-galactopyra nosyl]oxy]-14,14-bis[[3-[[3-[[5-[[2-(acetylamino)-2-deoxy-b eta-D-galactopyranosyl]oxy]-1-oxopentyl]amino]propyl]amino] -3-oxopropoxy]methyl]-1,12,19,25-tetraoxo-16-oxa-13,20,24-t riazanonacos-1-yl]-4-hydroxy-2-pyrrolidinyl)methyl ester
aggccaggagtcggaacattt

SEQ ID NO: 607 - RNA, 21 nt, synthetic construct
  source 1..21: mol_type = other RNA
  modified_base 1: mod_base = OTHER; note = 2'-O-methylguanosine-3'-phosphorothioate
  modified_base 2: mod_base = OTHER; note = 2'-O-methylguanosine-3'-phosphorothioate
  modified_base 3: mod_base = OTHER; note = 2'-O-methylcytidine-3'-phosphate
  modified_base 4: mod_base = OTHER; note = 2'-O-methylcytidine-3'-phosphate
  modified_base 5: mod_base = OTHER; note = 2'-O-methyladenosine-3'-phosphate
  modified_base 6: mod_base = OTHER; note = 2'-O-methylguanosine-3'-phosphate
  modified_base 7: mod_base = OTHER; note = 2'-deoxy-2'-fluoroguanosine-3'-phosphate
  modified_base 8: mod_base = OTHER; note = 2'-O-methyladenosine-3'-phosphate
  modified_base 9: mod_base = OTHER; note = 2'-deoxy-2'-fluoroguanosine-3'-phosphate
  modified_base 10: mod_base = OTHER; note = 2'-deoxy-2'-fluorouridine-3'-phosphate
  modified_base 11: mod_base = OTHER; note = 2'-deoxy-2'-fluorocytidine-3'-phosphate
  modified_base 12: mod_base = OTHER; note = 2'-O-methylguanosine-3'-phosphate
  modified_base 13: mod_base = OTHER; note = 2'-O-methylguanosine-3'-phosphate
  modified_base 14: mod_base = OTHER; note = 2'-O-methyladenosine-3'-phosphate
  modified_base 15: mod_base = OTHER; note = 2'-O-methyladenosine-3'-phosphate
  modified_base 16: mod_base = OTHER; note = 2'-O-methylcytidine-3'-phosphate
  modified_base 17: mod_base = OTHER; note = 2'-O-methyladenosine-3'-phosphate
  modified_base 18: mod_base = OTHER; note = 2'-O-methyluridine-3'-phosphate
  modified_base 19: mod_base = OTHER; note = 2'-O-methyluridine-3'-phosphate
  modified_base 20: mod_base = OTHER; note = 2'-O-methylguanosine-3'-phosphate
  modified_base 21: mod_base = OTHER; note = 2'-O-methyluridine-3'-phosphate ((2S,4R)-1-[29-[[2-(acetylamino)-2-deoxy-beta-D-galactopyra nosyl]oxy]-14,14-bis[[3-[[3-[[5-[[2-(acetylamino)-2-deoxy-b eta-D-galactopyranosyl]oxy]-1-oxopentyl]amino]propyl]amino] -3-oxopropoxy]methyl]-1,12,19,25-tetraoxo-16-oxa-13,20,24-t riazanonacos-1-yl]-4-hydroxy-2-pyrrolidinyl)methyl ester
ggccaggagtcggaacattgt

SEQ ID NO: 608 - RNA, 21 nt, synthetic construct
  source 1..21: mol_type = other RNA
  modified_base 1: mod_base = OTHER; note = 2'-O-methylguanosine-3'-phosphorothioate
  modified_base 2: mod_base = OTHER; note = 2'-O-methylcytidine-3'-phosphorothioate
  modified_base 3: mod_base = OTHER; note = 2'-O-methylcytidine-3'-phosphate
  modified_base 4: mod_base = OTHER; note = 2'-O-methyladenosine-3'-phosphate
  modified_base 5: mod_base = OTHER; note = 2'-O-methylguanosine-3'-phosphate
  modified_base 6: mod_base = OTHER; note = 2'-O-methylguanosine-3'-phosphate
  modified_base 7: mod_base = OTHER; note = 2'-deoxy-2'-fluoroadenosine-3'-phosphate
  modified_base 8: mod_base = OTHER; note = 2'-O-methylguanosine-3'-phosphate
  modified_base 9: mod_base = OTHER; note = 2'-deoxy-2'-fluorouridine-3'-phosphate
  modified_base 10: mod_base = OTHER; note = 2'-deoxy-2'-fluorocytidine-3'-phosphate
  modified_base 11: mod_base = OTHER; note = 2'-deoxy-2'-fluoroguanosine-3'-phosphate
  modified_base 12: mod_base = OTHER; note = 2'-O-methylguanosine-3'-phosphate
  modified_base 13: mod_base = OTHER; note = 2'-O-methyladenosine-3'-phosphate
  modified_base 14: mod_base = OTHER; note = 2'-O-methyladenosine-3'-phosphate
  modified_base 15: mod_base = OTHER; note = 2'-O-methylcytidine-3'-phosphate
  modified_base 16: mod_base = OTHER; note = 2'-O-methyladenosine-3'-phosphate
  modified_base 17: mod_base = OTHER; note = 2'-O-methyluridine-3'-phosphate
  modified_base 18: mod_base = OTHER; note = 2'-O-methyluridine-3'-phosphate
  modified_base 19: mod_base = OTHER; note = 2'-O-methylguanosine-3'-phosphate
  modified_base 20: mod_base = OTHER; note = 2'-O-methylguanosine-3'-phosphate
  modified_base 21: mod_base = OTHER; note = 2'-O-methyluridine-3'-phosphate ((2S,4R)-1-[29-[[2-(acetylamino)-2-deoxy-beta-D-galactopyra nosyl]oxy]-14,14-bis[[3-[[3-[[5-[[2-(acetylamino)-2-deoxy-b eta-D-galactopyranosyl]oxy]-1-oxopentyl]amino]propyl]amino] -3-oxopropoxy]methyl]-1,12,19,25-tetraoxo-16-oxa-13,20,24-t riazanonacos-1-yl]-4-hydroxy-2-pyrrolidinyl)methyl ester
gccaggagtcggaacattggt

SEQ ID NO: 609 - RNA, 21 nt, synthetic construct
  source 1..21: mol_type = other RNA
  modified_base 1: mod_base = OTHER; note = 2'-O-methylguanosine-3'-phosphorothioate
  modified_base 2: mod_base = OTHER; note = 2'-O-methylcytidine-3'-phosphorothioate
  modified_base 3: mod_base = OTHER; note = 2'-O-methyladenosine-3'-phosphate
  modified_base 4: mod_base = OTHER; note = 2'-O-methyluridine-3'-phosphate
  modified_base 5: mod_base = OTHER; note = 2'-O-methylcytidine-3'-phosphate
  modified_base 6: mod_base = OTHER; note = 2'-O-methyluridine-3'-phosphate
  modified_base 7: mod_base = OTHER; note = 2'-deoxy-2'-fluorouridine-3'-phosphate
  modified_base 8: mod_base = OTHER; note = 2'-O-methylcytidine-3'-phosphate
  modified_base 9: mod_base = OTHER; note = 2'-deoxy-2'-fluorocytidine-3'-phosphate
  modified_base 10: mod_base = OTHER; note = 2'-deoxy-2'-fluoroadenosine-3'-phosphate
  modified_base 11: mod_base = OTHER; note = 2'-deoxy-2'-fluorouridine-3'-phosphate
  modified_base 12: mod_base = OTHER; note = 2'-O-methylcytidine-3'-phosphate
  modified_base 13: mod_base = OTHER; note = 2'-O-methylcytidine-3'-phosphate
  modified_base 14: mod_base = OTHER; note = 2'-O-methyladenosine-3'-phosphate
  modified_base 15: mod_base = OTHER; note = 2'-O-methyluridine-3'-phosphate
  modified_base 16: mod_base = OTHER; note = 2'-O-methylcytidine-3'-phosphate
  modified_base 17: mod_base = OTHER; note = 2'-O-methylcytidine-3'-phosphate
  modified_base 18: mod_base = OTHER; note = 2'-O-methyluridine-3'-phosphate
  modified_base 19: mod_base = OTHER; note = 2'-O-methyluridine-3'-phosphate
  modified_base 20: mod_base = OTHER; note = 2'-O-methylcytidine-3'-phosphate
  modified_base 21: mod_base = OTHER; note = 2'-O-methyluridine-3'-phosphate ((2S,4R)-1-[29-[[2-(acetylamino)-2-deoxy-beta-D-galactopyra nosyl]oxy]-14,14-bis[[3-[[3-[[5-[[2-(acetylamino)-2-deoxy-b eta-D-galactopyranosyl]oxy]-1-oxopentyl]amino]propyl]amino] -3-oxopropoxy]methyl]-1,12,19,25-tetraoxo-16-oxa-13,20,24-t riazanonacos-1-yl]-4-hydroxy-2-pyrrolidinyl)methyl ester
gcatcttccatccatccttct

SEQ ID NO: 610 - RNA, 21 nt, synthetic construct
  source 1..21: mol_type = other RNA
  modified_base 1: mod_base = OTHER; note = 2'-O-methyluridine-3'-phosphorothioate
  modified_base 2: mod_base = OTHER; note = 2'-O-methylguanosine-3'-phosphorothioate
  modified_base 3: mod_base = OTHER; note = 2'-O-methylcytidine-3'-phosphate
  modified_base 4: mod_base = OTHER; note = 2'-O-methylcytidine-3'-phosphate
  modified_base 5: mod_base = OTHER; note = 2'-O-methyluridine-3'-phosphate
  modified_base 6: mod_base = OTHER; note = 2'-O-methylcytidine-3'-phosphate
  modified_base 7: mod_base = OTHER; note = 2'-deoxy-2'-fluorocytidine-3'-phosphate
  modified_base 8: mod_base = OTHER; note = 2'-O-methylcytidine-3'-phosphate
  modified_base 9: mod_base = OTHER; note = 2'-deoxy-2'-fluoroguanosine-3'-phosphate
  modified_base 10: mod_base = OTHER; note = 2'-deoxy-2'-fluoroguanosine-3'-phosphate
  modified_base 11: mod_base = OTHER; note = 2'-deoxy-2'-fluorocytidine-3'-phosphate
  modified_base 12: mod_base = OTHER; note = 2'-O-methylcytidine-3'-phosphate
  modified_base 13: mod_base = OTHER; note = 2'-O-methyladenosine-3'-phosphate
  modified_base 14: mod_base = OTHER; note = 2'-O-methyladenosine-3'-phosphate
  modified_base 15: mod_base = OTHER; note = 2'-O-methyluridine-3'-phosphate
  modified_base 16: mod_base = OTHER; note = 2'-O-methylguanosine-3'-phosphate
  modified_base 17: mod_base = OTHER; note = 2'-O-methyluridine-3'-phosphate
  modified_base 18: mod_base = OTHER; note = 2'-O-methylcytidine-3'-phosphate
  modified_base 19: mod_base = OTHER; note = 2'-O-methylcytidine-3'-phosphate
  modified_base 20: mod_base = OTHER; note = 2'-O-methyladenosine-3'-phosphate
  modified_base 21: mod_base = OTHER; note = 2'-O-methyluridine-3'-phosphate ((2S,4R)-1-[29-[[2-(acetylamino)-2-deoxy-beta-D-galactopyra nosyl]oxy]-14,14-bis[[3-[[3-[[5-[[2-(acetylamino)-2-deoxy-b eta-D-galactopyranosyl]oxy]-1-oxopentyl]amino]propyl]amino] -3-oxopropoxy]methyl]-1,12,19,25-tetraoxo-16-oxa-13,20,24-t riazanonacos-1-yl]-4-hydroxy-2-pyrrolidinyl)methyl ester
tgcctcccggccaatgtccat

SEQ ID NO: 611 - RNA, 21 nt, synthetic construct
  source 1..21: mol_type = other RNA
  modified_base 1: mod_base = OTHER; note = 2'-O-methylcytidine-3'-phosphorothioate
  modified_base 2: mod_base = OTHER; note = 2'-O-methyladenosine-3'-phosphorothioate
  modified_base 3: mod_base = OTHER; note = 2'-O-methyladenosine-3'-phosphate
  modified_base 4: mod_base = OTHER; note = 2'-O-methyluridine-3'-phosphate
  modified_base 5: mod_base = OTHER; note = 2'-O-methylguanosine-3'-phosphate
  modified_base 6: mod_base = OTHER; note = 2'-O-methyluridine-3'-phosphate
  modified_base 7: mod_base = OTHER; note = 2'-deoxy-2'-fluorocytidine-3'-phosphate
  modified_base 8: mod_base = OTHER; note = 2'-O-methylcytidine-3'-phosphate
  modified_base 9: mod_base = OTHER; note = 2'-deoxy-2'-fluoroadenosine-3'-phosphate
  modified_base 10: mod_base = OTHER; note = 2'-deoxy-2'-fluorocytidine-3'-phosphate
  modified_base 11: mod_base = OTHER; note = 2'-deoxy-2'-fluorocytidine-3'-phosphate
  modified_base 12: mod_base = OTHER; note = 2'-O-methyladenosine-3'-phosphate
  modified_base 13: mod_base = OTHER; note = 2'-O-methylguanosine-3'-phosphate
  modified_base 14: mod_base = OTHER; note = 2'-O-methylcytidine-3'-phosphate
  modified_base 15: mod_base = OTHER; note = 2'-O-methyluridine-3'-phosphate
  modified_base 16: mod_base = OTHER; note = 2'-O-methylcytidine-3'-phosphate
  modified_base 17: mod_base = OTHER; note = 2'-O-methyladenosine-3'-phosphate
  modified_base 18: mod_base = OTHER; note = 2'-O-methyluridine-3'-phosphate
  modified_base 19: mod_base = OTHER; note = 2'-O-methylcytidine-3'-phosphate
  modified_base 20: mod_base = OTHER; note = 2'-O-methyluridine-3'-phosphate
  modified_base 21: mod_base = OTHER; note = 2'-O-methyluridine-3'-phosphate ((2S,4R)-1-[29-[[2-(acetylamino)-2-deoxy-beta-D-galactopyra nosyl]oxy]-14,14-bis[[3-[[3-[[5-[[2-(acetylamino)-2-deoxy-b eta-D-galactopyranosyl]oxy]-1-oxopentyl]amino]propyl]amino] -3-oxopropoxy]methyl]-1,12,19,25-tetraoxo-16-oxa-13,20,24-t riazanonacos-1-yl]-4-hydroxy-2-pyrrolidinyl)methyl ester
caatgtccaccagctcatctt

SEQ ID NO: 612 - RNA, 21 nt, synthetic construct
  source 1..21: mol_type = other RNA
  modified_base 1: mod_base = OTHER; note = 2'-O-methyladenosine-3'-phosphorothioate
  modified_base 2: mod_base = OTHER; note = 2'-O-methyladenosine-3'-phosphorothioate
  modified_base 3: mod_base = OTHER; note = 2'-O-methyluridine-3'-phosphate
  modified_base 4: mod_base = OTHER; note = 2'-O-methylguanosine-3'-phosphate
  modified_base 5: mod_base = OTHER; note = 2'-O-methyluridine-3'-phosphate
  modified_base 6: mod_base = OTHER; note = 2'-O-methylcytidine-3'-phosphate
  modified_base 7: mod_base = OTHER; note = 2'-deoxy-2'-fluorocytidine-3'-phosphate
  modified_base 8: mod_base = OTHER; note = 2'-O-methyladenosine-3'-phosphate
  modified_base 9: mod_base = OTHER; note = 2'-deoxy-2'-fluorocytidine-3'-phosphate
  modified_base 10: mod_base = OTHER; note = 2'-deoxy-2'-fluorocytidine-3'-phosphate
  modified_base 11: mod_base = OTHER; note = 2'-deoxy-2'-fluoroadenosine-3'-phosphate
  modified_base 12: mod_base = OTHER; note = 2'-O-methylguanosine-3'-phosphate
  modified_base 13: mod_base = OTHER; note = 2'-O-methylcytidine-3'-phosphate
  modified_base 14: mod_base = OTHER; note = 2'-O-methyluridine-3'-phosphate
  modified_base 15: mod_base = OTHER; note = 2'-O-methylcytidine-3'-phosphate
  modified_base 16: mod_base = OTHER; note = 2'-O-methyladenosine-3'-phosphate
  modified_base 17: mod_base = OTHER; note = 2'-O-methyluridine-3'-phosphate
  modified_base 18: mod_base = OTHER; note = 2'-O-methylcytidine-3'-phosphate
  modified_base 19: mod_base = OTHER; note = 2'-O-methyluridine-3'-phosphate
  modified_base 20: mod_base = OTHER; note = 2'-O-methylcytidine-3'-phosphate
  modified_base 21: mod_base = OTHER; note = 2'-O-methyluridine-3'-phosphate ((2S,4R)-1-[29-[[2-(acetylamino)-2-deoxy-beta-D-galactopyra nosyl]oxy]-14,14-bis[[3-[[3-[[5-[[2-(acetylamino)-2-deoxy-b eta-D-galactopyranosyl]oxy]-1-oxopentyl]amino]propyl]amino] -3-oxopropoxy]methyl]-1,12,19,25-tetraoxo-16-oxa-13,20,24-t riazanonacos-1-yl]-4-hydroxy-2-pyrrolidinyl)methyl ester
aatgtccaccagctcatctct

SEQ ID NO: 613 - RNA, 21 nt, synthetic construct
  source 1..21: mol_type = other RNA
  modified_base 1: mod_base = OTHER; note = 2'-O-methylguanosine-3'-phosphorothioate
  modified_base 2: mod_base = OTHER; note = 2'-O-methyluridine-3'-phosphorothioate
  modified_base 3: mod_base = OTHER; note = 2'-O-methylcytidine-3'-phosphate
  modified_base 4: mod_base = OTHER; note = 2'-O-methylcytidine-3'-phosphate
  modified_base 5: mod_base = OTHER; note = 2'-O-methyladenosine-3'-phosphate
  modified_base 6: mod_base = OTHER; note = 2'-O-methyladenosine-3'-phosphate
  modified_base 7: mod_base = OTHER; note = 2'-deoxy-2'-fluoroadenosine-3'-phosphate
  modified_base 8: mod_base = OTHER; note = 2'-O-methylguanosine-3'-phosphate
  modified_base 9: mod_base = OTHER; note = 2'-deoxy-2'-fluoroadenosine-3'-phosphate
  modified_base 10: mod_base = OTHER; note = 2'-deoxy-2'-fluorocytidine-3'-phosphate
  modified_base 11: mod_base = OTHER; note = 2'-deoxy-2'-fluoroguanosine-3'-phosphate
  modified_base 12: mod_base = OTHER; note = 2'-O-methyladenosine-3'-phosphate
  modified_base 13: mod_base = OTHER; note = 2'-O-methyladenosine-3'-phosphate
  modified_base 14: mod_base = OTHER; note = 2'-O-methylguanosine-3'-phosphate
  modified_base 15: mod_base = OTHER; note = 2'-O-methyluridine-3'-phosphate
  modified_base 16: mod_base = OTHER; note = 2'-O-methylcytidine-3'-phosphate
  modified_base 17: mod_base = OTHER; note = 2'-O-methylguanosine-3'-phosphate
  modified_base 18: mod_base = OTHER; note = 2'-O-methyluridine-3'-phosphate
  modified_base 19: mod_base = OTHER; note = 2'-O-methylguanosine-3'-phosphate
  modified_base 20: mod_base = OTHER; note = 2'-O-methylguanosine-3'-phosphate
  modified_base 21: mod_base = OTHER; note = 2'-O-methyluridine-3'-phosphate ((2S,4R)-1-[29-[[2-(acetylamino)-2-deoxy-beta-D-galactopyra nosyl]oxy]-14,14-bis[[3-[[3-[[5-[[2-(acetylamino)-2-deoxy-b eta-D-galactopyranosyl]oxy]-1-oxopentyl]amino]propyl]amino] -3-oxopropoxy]methyl]-1,12,19,25-tetraoxo-16-oxa-13,20,24-t riazanonacos-1-yl]-4-hydroxy-2-pyrrolidinyl)methyl ester
gtccaaagacgaagtcgtggt

SEQ ID NO: 614 - RNA, 21 nt, synthetic construct
  source 1..21: mol_type = other RNA
  modified_base 1: mod_base = OTHER; note = 2'-O-methyluridine-3'-phosphorothioate
  modified_base 2: mod_base = OTHER; note = 2'-O-methylcytidine-3'-phosphorothioate
  modified_base 3: mod_base = OTHER; note = 2'-O-methylcytidine-3'-phosphate
  modified_base 4: mod_base = OTHER; note = 2'-O-methyladenosine-3'-phosphate
  modified_base 5: mod_base = OTHER; note = 2'-O-methyladenosine-3'-phosphate
  modified_base 6: mod_base = OTHER; note = 2'-O-methyladenosine-3'-phosphate
  modified_base 7: mod_base = OTHER; note = 2'-deoxy-2'-fluoroguanosine-3'-phosphate
  modified_base 8: mod_base = OTHER; note = 2'-O-methyladenosine-3'-phosphate
  modified_base 9: mod_base = OTHER; note = 2'-deoxy-2'-fluorocytidine-3'-phosphate
  modified_base 10: mod_base = OTHER; note = 2'-deoxy-2'-fluoroguanosine-3'-phosphate
  modified_base 11: mod_base = OTHER; note = 2'-deoxy-2'-fluoroadenosine-3'-phosphate
  modified_base 12: mod_base = OTHER; note = 2'-O-methyladenosine-3'-phosphate
  modified_base 13: mod_base = OTHER; note = 2'-O-methylguanosine-3'-phosphate
  modified_base 14: mod_base = OTHER; note = 2'-O-methyluridine-3'-phosphate
  modified_base 15: mod_base = OTHER; note = 2'-O-methylcytidine-3'-phosphate
  modified_base 16: mod_base = OTHER; note = 2'-O-methylguanosine-3'-phosphate
  modified_base 17: mod_base = OTHER; note = 2'-O-methyluridine-3'-phosphate
  modified_base 18: mod_base = OTHER; note = 2'-O-methylguanosine-3'-phosphate
  modified_base 19: mod_base = OTHER; note = 2'-O-methylguanosine-3'-phosphate
  modified_base 20: mod_base = OTHER; note = 2'-O-methyladenosine-3'-phosphate
  modified_base 21: mod_base = OTHER; note = 2'-O-methyluridine-3'-phosphate ((2S,4R)-1-[29-[[2-(acetylamino)-2-deoxy-beta-D-galactopyra nosyl]oxy]-14,14-bis[[3-[[3-[[5-[[2-(acetylamino)-2-deoxy-b eta-D-galactopyranosyl]oxy]-1-oxopentyl]amino]propyl]amino] -3-oxopropoxy]methyl]-1,12,19,25-tetraoxo-16-oxa-13,20,24-t riazanonacos-1-yl]-4-hydroxy-2-pyrrolidinyl)methyl ester
tccaaagacgaagtcgtggat

SEQ ID NO: 615 - RNA, 21 nt, synthetic construct
  source 1..21: mol_type = other RNA
  modified_base 1: mod_base = OTHER; note = 2'-O-methylcytidine-3'-phosphorothioate
  modified_base 2: mod_base = OTHER; note = 2'-O-methylcytidine-3'-phosphorothioate
  modified_base 3: mod_base = OTHER; note = 2'-O-methyladenosine-3'-phosphate
  modified_base 4: mod_base = OTHER; note = 2'-O-methyladenosine-3'-phosphate
  modified_base 5: mod_base = OTHER; note = 2'-O-methyladenosine-3'-phosphate
  modified_base 6: mod_base = OTHER; note = 2'-O-methylguanosine-3'-phosphate
  modified_base 7: mod_base = OTHER; note = 2'-deoxy-2'-fluoroadenosine-3'-phosphate
  modified_base 8: mod_base = OTHER; note = 2'-O-methylcytidine-3'-phosphate
  modified_base 9: mod_base = OTHER; note = 2'-deoxy-2'-fluoroguanosine-3'-phosphate
  modified_base 10: mod_base = OTHER; note = 2'-deoxy-2'-fluoroadenosine-3'-phosphate
  modified_base 11: mod_base = OTHER; note = 2'-deoxy-2'-fluoroadenosine-3'-phosphate
  modified_base 12: mod_base = OTHER; note = 2'-O-methylguanosine-3'-phosphate
  modified_base 13: mod_base = OTHER; note = 2'-O-methyluridine-3'-phosphate
  modified_base 14: mod_base = OTHER; note = 2'-O-methylcytidine-3'-phosphate
  modified_base 15: mod_base = OTHER; note = 2'-O-methylguanosine-3'-phosphate
  modified_base 16: mod_base = OTHER; note = 2'-O-methyluridine-3'-phosphate
  modified_base 17: mod_base = OTHER; note = 2'-O-methylguanosine-3'-phosphate
  modified_base 18: mod_base = OTHER; note = 2'-O-methylguanosine-3'-phosphate
  modified_base 19: mod_base = OTHER; note = 2'-O-methyladenosine-3'-phosphate
  modified_base 20: mod_base = OTHER; note = 2'-O-methyluridine-3'-phosphate
  modified_base 21: mod_base = OTHER; note = 2'-O-methyluridine-3'-phosphate ((2S,4R)-1-[29-[[2-(acetylamino)-2-deoxy-beta-D-galactopyra nosyl]oxy]-14,14-bis[[3-[[3-[[5-[[2-(acetylamino)-2-deoxy-b eta-D-galactopyranosyl]oxy]-1-oxopentyl]amino]propyl]amino] -3-oxopropoxy]methyl]-1,12,19,25-tetraoxo-16-oxa-13,20,24-t riazanonacos-1-yl]-4-hydroxy-2-pyrrolidinyl)methyl ester
ccaaagacgaagtcgtggatt

SEQ ID NO: 616 - RNA, 21 nt, synthetic construct
  source 1..21: mol_type = other RNA
  modified_base 1: mod_base = OTHER; note = 2'-O-methylcytidine-3'-phosphorothioate
  modified_base 2: mod_base = OTHER; note = 2'-O-methyladenosine-3'-phosphorothioate
  modified_base 3: mod_base = OTHER; note = 2'-O-methyladenosine-3'-phosphate
  modified_base 4: mod_base = OTHER; note = 2'-O-methyladenosine-3'-phosphate
  modified_base 5: mod_base = OTHER; note = 2'-O-methylguanosine-3'-phosphate
  modified_base 6: mod_base = OTHER; note = 2'-O-methyladenosine-3'-phosphate
  modified_base 7: mod_base = OTHER; note = 2'-deoxy-2'-fluorocytidine-3'-phosphate
  modified_base 8: mod_base = OTHER; note = 2'-O-methylguanosine-3'-phosphate
  modified_base 9: mod_base = OTHER; note = 2'-deoxy-2'-fluoroadenosine-3'-phosphate
  modified_base 10: mod_base = OTHER; note = 2'-deoxy-2'-fluoroadenosine-3'-phosphate
  modified_base 11: mod_base = OTHER; note = 2'-deoxy-2'-fluoroguanosine-3'-phosphate
  modified_base 12: mod_base = OTHER; note = 2'-O-methyluridine-3'-phosphate
  modified_base 13: mod_base = OTHER; note = 2'-O-methylcytidine-3'-phosphate
  modified_base 14: mod_base = OTHER; note = 2'-O-methylguanosine-3'-phosphate
  modified_base 15: mod_base = OTHER; note = 2'-O-methyluridine-3'-phosphate
  modified_base 16: mod_base = OTHER; note = 2'-O-methylguanosine-3'-phosphate
  modified_base 17: mod_base = OTHER; note = 2'-O-methylguanosine-3'-phosphate
  modified_base 18: mod_base = OTHER; note = 2'-O-methyladenosine-3'-phosphate
  modified_base 19: mod_base = OTHER; note = 2'-O-methyluridine-3'-phosphate
  modified_base 20: mod_base = OTHER; note = 2'-O-methylguanosine-3'-phosphate
  modified_base 21: mod_base = OTHER; note = 2'-O-methyluridine-3'-phosphate ((2S,4R)-1-[29-[[2-(acetylamino)-2-deoxy-beta-D-galactopyra nosyl]oxy]-14,14-bis[[3-[[3-[[5-[[2-(acetylamino)-2-deoxy-b eta-D-galactopyranosyl]oxy]-1-oxopentyl]amino]propyl]amino] -3-oxopropoxy]methyl]-1,12,19,25-tetraoxo-16-oxa-13,20,24-t riazanonacos-1-yl]-4-hydroxy-2-pyrrolidinyl)methyl ester
caaagacgaagtcgtggatgt

SEQ ID NO: 617 - RNA, 21 nt, synthetic construct
  source 1..21: mol_type = other RNA
  modified_base 1: mod_base = OTHER; note = 2'-O-methyladenosine-3'-phosphorothioate
  modified_base 2: mod_base = OTHER; note = 2'-O-methylguanosine-3'-phosphorothioate
  modified_base 3: mod_base = OTHER; note = 2'-O-methyladenosine-3'-phosphate
  modified_base 4: mod_base = OTHER; note = 2'-O-methylcytidine-3'-phosphate
  modified_base 5: mod_base = OTHER; note = 2'-O-methylguanosine-3'-phosphate
  modified_base 6: mod_base = OTHER; note = 2'-O-methyladenosine-3'-phosphate
  modified_base 7: mod_base = OTHER; note = 2'-deoxy-2'-fluoroadenosine-3'-phosphate
  modified_base 8: mod_base = OTHER; note = 2'-O-methylguanosine-3'-phosphate
  modified_base 9: mod_base = OTHER; note = 2'-deoxy-2'-fluorouridine-3'-phosphate
  modified_base 10: mod_base = OTHER; note = 2'-deoxy-2'-fluorocytidine-3'-phosphate
  modified_base 11: mod_base = OTHER; note = 2'-deoxy-2'-fluoroguanosine-3'-phosphate
  modified_base 12: mod_base = OTHER; note = 2'-O-methyluridine-3'-phosphate
  modified_base 13: mod_base = OTHER; note = 2'-O-methylguanosine-3'-phosphate
  modified_base 14: mod_base = OTHER; note = 2'-O-methylguanosine-3'-phosphate
  modified_base 15: mod_base = OTHER; note = 2'-O-methyladenosine-3'-phosphate
  modified_base 16: mod_base = OTHER; note = 2'-O-methyluridine-3'-phosphate
  modified_base 17: mod_base = OTHER; note = 2'-O-methylguanosine-3'-phosphate
  modified_base 18: mod_base = OTHER; note = 2'-O-methylcytidine-3'-phosphate
  modified_base 19: mod_base = OTHER; note = 2'-O-methylcytidine-3'-phosphate
  modified_base 20: mod_base = OTHER; note = 2'-O-methyluridine-3'-phosphate
  modified_base 21: mod_base = OTHER; note = 2'-O-methyluridine-3'-phosphate ((2S,4R)-1-[29-[[2-(acetylamino)-2-deoxy-beta-D-galactopyra nosyl]oxy]-14,14-bis[[3-[[3-[[5-[[2-(acetylamino)-2-deoxy-b eta-D-galactopyranosyl]oxy]-1-oxopentyl]amino]propyl]amino] -3-oxopropoxy]methyl]-1,12,19,25-tetraoxo-16-oxa-13,20,24-t riazanonacos-1-yl]-4-hydroxy-2-pyrrolidinyl)methyl ester
agacgaagtcgtggatgcctt

SEQ ID NO: 618 - RNA, 21 nt, synthetic construct
  source 1..21: mol_type = other RNA
  modified_base 1: mod_base = OTHER; note = 2'-O-methylcytidine-3'-phosphorothioate
  modified_base 2: mod_base = OTHER; note = 2'-O-methyluridine-3'-phosphorothioate
  modified_base 3: mod_base = OTHER; note = 2'-O-methyluridine-3'-phosphate
  modified_base 4: mod_base = OTHER; note = 2'-O-methylcytidine-3'-phosphate
  modified_base 5: mod_base = OTHER; note = 2'-O-methyluridine-3'-phosphate
  modified_base 6: mod_base = OTHER; note = 2'-O-methyladenosine-3'-phosphate
  modified_base 7: mod_base = OTHER; note = 2'-deoxy-2'-fluorocytidine-3'-phosphate
  modified_base 8: mod_base = OTHER; note = 2'-O-methyladenosine-3'-phosphate
  modified_base 9: mod_base = OTHER; note = 2'-deoxy-2'-fluoroguanosine-3'-phosphate
  modified_base 10: mod_base = OTHER; note = 2'-deoxy-2'-fluorouridine-3'-phosphate
  modified_base 11: mod_base = OTHER; note = 2'-deoxy-2'-fluoroguanosine-3'-phosphate
  modified_base 12: mod_base = OTHER; note = 2'-O-methylguanosine-3'-phosphate
  modified_base 13: mod_base = OTHER; note = 2'-O-methylcytidine-3'-phosphate
  modified_base 14: mod_base = OTHER; note = 2'-O-methylcytidine-3'-phosphate
  modified_base 15: mod_base = OTHER; note = 2'-O-methyluridine-3'-phosphate
  modified_base 16: mod_base = OTHER; note = 2'-O-methyluridine-3'-phosphate
  modified_base 17: mod_base = OTHER; note = 2'-O-methyladenosine-3'-phosphate
  modified_base 18: mod_base = OTHER; note = 2'-O-methyluridine-3'-phosphate
  modified_base 19: mod_base = OTHER; note = 2'-O-methylcytidine-3'-phosphate
  modified_base 20: mod_base = OTHER; note = 2'-O-methylcytidine-3'-phosphate
  modified_base 21: mod_base = OTHER; note = 2'-O-methyluridine-3'-phosphate ((2S,4R)-1-[29-[[2-(acetylamino)-2-deoxy-beta-D-galactopyra nosyl]oxy]-14,14-bis[[3-[[3-[[5-[[2-(acetylamino)-2-deoxy-b eta-D-galactopyranosyl]oxy]-1-oxopentyl]amino]propyl]amino] -3-oxopropoxy]methyl]-1,12,19,25-tetraoxo-16-oxa-13,20,24-t riazanonacos-1-yl]-4-hydroxy-2-pyrrolidinyl)methyl ester
cttctacagtggccttatcct

SEQ ID NO: 619 - RNA, 21 nt, synthetic construct
  source 1..21: mol_type = other RNA
  modified_base 1: mod_base = OTHER; note = 2'-O-methyluridine-3'-phosphorothioate
  modified_base 2: mod_base = OTHER; note = 2'-O-methyluridine-3'-phosphorothioate
  modified_base 3: mod_base = OTHER; note = 2'-O-methylcytidine-3'-phosphate
  modified_base 4: mod_base = OTHER; note = 2'-O-methyluridine-3'-phosphate
  modified_base 5: mod_base = OTHER; note = 2'-O-methyladenosine-3'-phosphate
  modified_base 6: mod_base = OTHER; note = 2'-O-methylcytidine-3'-phosphate
  modified_base 7: mod_base = OTHER; note = 2'-deoxy-2'-fluoroadenosine-3'-phosphate
  modified_base 8: mod_base = OTHER; note = 2'-O-methylguanosine-3'-phosphate
  modified_base 9: mod_base = OTHER; note = 2'-deoxy-2'-fluorouridine-3'-phosphate
  modified_base 10: mod_base = OTHER; note = 2'-deoxy-2'-fluoroguanosine-3'-phosphate
  modified_base 11: mod_base = OTHER; note = 2'-deoxy-2'-fluoroguanosine-3'-phosphate
  modified_base 12: mod_base = OTHER; note = 2'-O-methylcytidine-3'-phosphate
  modified_base 13: mod_base = OTHER; note = 2'-O-methylcytidine-3'-phosphate
  modified_base 14: mod_base = OTHER; note = 2'-O-methyluridine-3'-phosphate
  modified_base 15: mod_base = OTHER; note = 2'-O-methyluridine-3'-phosphate
  modified_base 16: mod_base = OTHER; note = 2'-O-methyladenosine-3'-phosphate
  modified_base 17: mod_base = OTHER; note = 2'-O-methyluridine-3'-phosphate
  modified_base 18: mod_base = OTHER; note = 2'-O-methylcytidine-3'-phosphate
  modified_base 19: mod_base = OTHER; note = 2'-O-methylcytidine-3'-phosphate
  modified_base 20: mod_base = OTHER; note = 2'-O-methylcytidine-3'-phosphate
  modified_base 21: mod_base = OTHER; note = 2'-O-methyluridine-3'-phosphate ((2S,4R)-1-[29-[[2-(acetylamino)-2-deoxy-beta-D-galactopyra nosyl]oxy]-14,14-bis[[3-[[3-[[5-[[2-(acetylamino)-2-deoxy-b eta-D-galactopyranosyl]oxy]-1-oxopentyl]amino]propyl]amino] -3-oxopropoxy]methyl]-1,12,19,25-tetraoxo-16-oxa-13,20,24-t riazanonacos-1-yl]-4-hydroxy-2-pyrrolidinyl)methyl ester
ttctacagtggccttatccct

SEQ ID NO: 620 - RNA, 21 nt, synthetic construct
  source 1..21: mol_type = other RNA
  modified_base 1: mod_base = OTHER; note = 2'-O-methyluridine-3'-phosphorothioate
  modified_base 2: mod_base = OTHER; note = 2'-O-methylcytidine-3'-phosphorothioate
  modified_base 3: mod_base = OTHER; note = 2'-O-methyluridine-3'-phosphate
  modified_base 4: mod_base = OTHER; note = 2'-O-methyladenosine-3'-phosphate
  modified_base 5: mod_base = OTHER; note = 2'-O-methylcytidine-3'-phosphate
  modified_base 6: mod_base = OTHER; note = 2'-O-methyladenosine-3'-phosphate
  modified_base 7: mod_base = OTHER; note = 2'-deoxy-2'-fluoroguanosine-3'-phosphate
  modified_base 8: mod_base = OTHER; note = 2'-O-methyluridine-3'-phosphate
  modified_base 9: mod_base = OTHER; note = 2'-deoxy-2'-fluoroguanosine-3'-phosphate
  modified_base 10: mod_base = OTHER; note = 2'-deoxy-2'-fluoroguanosine-3'-phosphate
  modified_base 11: mod_base = OTHER; note = 2'-deoxy-2'-fluorocytidine-3'-phosphate
  modified_base 12: mod_base = OTHER; note = 2'-O-methylcytidine-3'-phosphate
  modified_base 13: mod_base = OTHER; note = 2'-O-methyluridine-3'-phosphate
  modified_base 14: mod_base = OTHER; note = 2'-O-methyluridine-3'-phosphate
  modified_base 15: mod_base = OTHER; note = 2'-O-methyladenosine-3'-phosphate
  modified_base 16: mod_base = OTHER; note = 2'-O-methyluridine-3'-phosphate
  modified_base 17: mod_base = OTHER; note = 2'-O-methylcytidine-3'-phosphate
  modified_base 18: mod_base = OTHER; note = 2'-O-methylcytidine-3'-phosphate
  modified_base 19: mod_base = OTHER; note = 2'-O-methylcytidine-3'-phosphate
  modified_base 20: mod_base = OTHER; note = 2'-O-methyluridine-3'-phosphate
  modified_base 21: mod_base = OTHER; note = 2'-O-methyluridine-3'-phosphate ((2S,4R)-1-[29-[[2-(acetylamino)-2-deoxy-beta-D-galactopyra nosyl]oxy]-14,14-bis[[3-[[3-[[5-[[2-(acetylamino)-2-deoxy-b eta-D-galactopyranosyl]oxy]-1-oxopentyl]amino]propyl]amino] -3-oxopropoxy]methyl]-1,12,19,25-tetraoxo-16-oxa-13,20,24-t riazanonacos-1-yl]-4-hydroxy-2-pyrrolidinyl)methyl ester
tctacagtggccttatccctt

SEQ ID NO: 621 - RNA, 21 nt, synthetic construct
  source 1..21: mol_type = other RNA
  modified_base 1: mod_base = OTHER; note = 2'-O-methylcytidine-3'-phosphorothioate
  modified_base 2: mod_base = OTHER; note = 2'-O-methyluridine-3'-phosphorothioate
  modified_base 3: mod_base = OTHER; note = 2'-O-methyladenosine-3'-phosphate
  modified_base 4: mod_base = OTHER; note = 2'-O-methylcytidine-3'-phosphate
  modified_base 5: mod_base = OTHER; note = 2'-O-methyladenosine-3'-phosphate
  modified_base 6: mod_base = OTHER; note = 2'-O-methylguanosine-3'-phosphate
  modified_base 7: mod_base = OTHER; note = 2'-deoxy-2'-fluorouridine-3'-phosphate
  modified_base 8: mod_base = OTHER; note = 2'-O-methylguanosine-3'-phosphate
  modified_base 9: mod_base = OTHER; note = 2'-deoxy-2'-fluoroguanosine-3'-phosphate
  modified_base 10: mod_base = OTHER; note = 2'-deoxy-2'-fluorocytidine-3'-phosphate
  modified_base 11: mod_base = OTHER; note = 2'-deoxy-2'-fluorocytidine-3'-phosphate
  modified_base 12: mod_base = OTHER; note = 2'-O-methyluridine-3'-phosphate
  modified_base 13: mod_base = OTHER; note = 2'-O-methyluridine-3'-phosphate
  modified_base 14: mod_base = OTHER; note = 2'-O-methyladenosine-3'-phosphate
  modified_base 15: mod_base = OTHER; note = 2'-O-methyluridine-3'-phosphate
  modified_base 16: mod_base = OTHER; note = 2'-O-methylcytidine-3'-phosphate
  modified_base 17: mod_base = OTHER; note = 2'-O-methylcytidine-3'-phosphate
  modified_base 18: mod_base = OTHER; note = 2'-O-methylcytidine-3'-phosphate
  modified_base 19: mod_base = OTHER; note = 2'-O-methyluridine-3'-phosphate
  modified_base 20: mod_base = OTHER; note = 2'-O-methylcytidine-3'-phosphate
  modified_base 21: mod_base = OTHER; note = 2'-O-methyluridine-3'-phosphate ((2S,4R)-1-[29-[[2-(acetylamino)-2-deoxy-beta-D-galactopyra nosyl]oxy]-14,14-bis[[3-[[3-[[5-[[2-(acetylamino)-2-deoxy-b eta-D-galactopyranosyl]oxy]-1-oxopentyl]amino]propyl]amino] -3-oxopropoxy]methyl]-1,12,19,25-tetraoxo-16-oxa-13,20,24-t riazanonacos-1-yl]-4-hydroxy-2-pyrrolidinyl)methyl ester
ctacagtggccttatccctct

SEQ ID NO: 622 - RNA, 21 nt, synthetic construct
  source 1..21: mol_type = other RNA
  modified_base 1: mod_base = OTHER; note = 2'-O-methyladenosine-3'-phosphorothioate
  modified_base 2: mod_base = OTHER; note = 2'-O-methylguanosine-3'-phosphorothioate
  modified_base 3: mod_base = OTHER; note = 2'-O-methyluridine-3'-phosphate
  modified_base 4: mod_base = OTHER; note = 2'-O-methylguanosine-3'-phosphate
  modified_base 5: mod_base = OTHER; note = 2'-O-methylguanosine-3'-phosphate
  modified_base 6: mod_base = OTHER; note = 2'-O-methylcytidine-3'-phosphate
  modified_base 7: mod_base = OTHER; note = 2'-deoxy-2'-fluorocytidine-3'-phosphate
  modified_base 8: mod_base = OTHER; note = 2'-O-methyluridine-3'-phosphate
  modified_base 9: mod_base = OTHER; note = 2'-deoxy-2'-fluorouridine-3'-phosphate
  modified_base 10: mod_base = OTHER; note = 2'-deoxy-2'-fluoroadenosine-3'-phosphate
  modified_base 11: mod_base = OTHER; note = 2'-deoxy-2'-fluorouridine-3'-phosphate
  modified_base 12: mod_base = OTHER; note = 2'-O-methylcytidine-3'-phosphate
  modified_base 13: mod_base = OTHER; note = 2'-O-methylcytidine-3'-phosphate
  modified_base 14: mod_base = OTHER; note = 2'-O-methylcytidine-3'-phosphate
  modified_base 15: mod_base = OTHER; note = 2'-O-methyluridine-3'-phosphate
  modified_base 16: mod_base = OTHER; note = 2'-O-methylcytidine-3'-phosphate
  modified_base 17: mod_base = OTHER; note = 2'-O-methylcytidine-3'-phosphate
  modified_base 18: mod_base = OTHER; note = 2'-O-methyluridine-3'-phosphate
  modified_base 19: mod_base = OTHER; note = 2'-O-methyluridine-3'-phosphate
  modified_base 20: mod_base = OTHER; note = 2'-O-methylcytidine-3'-phosphate
  modified_base 21: mod_base = OTHER; note = 2'-O-methyluridine-3'-phosphate ((2S,4R)-1-[29-[[2-(acetylamino)-2-deoxy-beta-D-galactopyra nosyl]oxy]-14,14-bis[[3-[[3-[[5-[[2-(acetylamino)-2-deoxy-b eta-D-galactopyranosyl]oxy]-1-oxopentyl]amino]propyl]amino] -3-oxopropoxy]methyl]-1,12,19,25-tetraoxo-16-oxa-13,20,24-t riazanonacos-1-yl]-4-hydroxy-2-pyrrolidinyl)methyl ester
agtggccttatccctccttct

SEQ ID NO: 623 - RNA, 21 nt, synthetic construct
  source 1..21: mol_type = other RNA
  modified_base 1: mod_base = OTHER; note = 2'-O-methyluridine-3'-phosphorothioate
  modified_base 2: mod_base = OTHER; note = 2'-O-methylguanosine-3'-phosphorothioate
  modified_base 3: mod_base = OTHER; note = 2'-O-methylguanosine-3'-phosphate
  modified_base 4: mod_base = OTHER; note = 2'-O-methylcytidine-3'-phosphate
  modified_base 5: mod_base = OTHER; note = 2'-O-methylcytidine-3'-phosphate
  modified_base 6: mod_base = OTHER; note = 2'-O-methyluridine-3'-phosphate
  modified_base 7: mod_base = OTHER; note = 2'-deoxy-2'-fluorouridine-3'-phosphate
  modified_base 8: mod_base = OTHER; note = 2'-O-methyladenosine-3'-phosphate
  modified_base 9: mod_base = OTHER; note = 2'-deoxy-2'-fluorouridine-3'-phosphate
  modified_base 10: mod_base = OTHER; note = 2'-deoxy-2'-fluorocytidine-3'-phosphate
  modified_base 11: mod_base = OTHER; note = 2'-deoxy-2'-fluorocytidine-3'-phosphate
  modified_base 12: mod_base = OTHER; note = 2'-O-methylcytidine-3'-phosphate
  modified_base 13: mod_base = OTHER; note = 2'-O-methyluridine-3'-phosphate
  modified_base 14: mod_base = OTHER; note = 2'-O-methylcytidine-3'-phosphate
  modified_base 15: mod_base = OTHER; note = 2'-O-methylcytidine-3'-phosphate
  modified_base 16: mod_base = OTHER; note = 2'-O-methyluridine-3'-phosphate
  modified_base 17: mod_base = OTHER; note = 2'-O-methyluridine-3'-phosphate
  modified_base 18: mod_base = OTHER; note = 2'-O-methylcytidine-3'-phosphate
  modified_base 19: mod_base = OTHER; note = 2'-O-methylcytidine-3'-phosphate
  modified_base 20: mod_base = OTHER; note = 2'-O-methyluridine-3'-phosphate
  modified_base 21: mod_base = OTHER; note = 2'-O-methyluridine-3'-phosphate ((2S,4R)-1-[29-[[2-(acetylamino)-2-deoxy-beta-D-galactopyra nosyl]oxy]-14,14-bis[[3-[[3-[[5-[[2-(acetylamino)-2-deoxy-b eta-D-galactopyranosyl]oxy]-1-oxopentyl]amino]propyl]amino] -3-oxopropoxy]methyl]-1,12,19,25-tetraoxo-16-oxa-13,20,24-t riazanonacos-1-yl]-4-hydroxy-2-pyrrolidinyl)methyl ester
tggccttatccctccttcctt

SEQ ID NO: 624 - RNA, 21 nt, synthetic construct
  source 1..21: mol_type = other RNA
  modified_base 1: mod_base = OTHER; note = 2'-O-methylcytidine-3'-phosphorothioate
  modified_base 2: mod_base = OTHER; note = 2'-O-methyluridine-3'-phosphorothioate
  modified_base 3: mod_base = OTHER; note = 2'-O-methyluridine-3'-phosphate
  modified_base 4: mod_base = OTHER; note = 2'-O-methyladenosine-3'-phosphate
  modified_base 5: mod_base = OTHER; note = 2'-O-methyluridine-3'-phosphate
  modified_base 6: mod_base = OTHER; note = 2'-O-methylcytidine-3'-phosphate
  modified_base 7: mod_base = OTHER; note = 2'-deoxy-2'-fluorocytidine-3'-phosphate
  modified_base 8: mod_base = OTHER; note = 2'-O-methylcytidine-3'-phosphate
  modified_base 9: mod_base = OTHER; note = 2'-deoxy-2'-fluorouridine-3'-phosphate
  modified_base 10: mod_base = OTHER; note = 2'-deoxy-2'-fluorocytidine-3'-phosphate
  modified_base 11: mod_base = OTHER; note = 2'-deoxy-2'-fluorocytidine-3'-phosphate
  modified_base 12: mod_base = OTHER; note = 2'-O-methyluridine-3'-phosphate
  modified_base 13: mod_base = OTHER; note = 2'-O-methyluridine-3'-phosphate
  modified_base 14: mod_base = OTHER; note = 2'-O-methylcytidine-3'-phosphate
  modified_base 15: mod_base = OTHER; note = 2'-O-methylcytidine-3'-phosphate
  modified_base 16: mod_base = OTHER; note = 2'-O-methyluridine-3'-phosphate
  modified_base 17: mod_base = OTHER; note = 2'-O-methyluridine-3'-phosphate
  modified_base 18: mod_base = OTHER; note = 2'-O-methylcytidine-3'-phosphate
  modified_base 19: mod_base = OTHER; note = 2'-O-methyladenosine-3'-phosphate
  modified_base 20: mod_base = OTHER; note = 2'-O-methylguanosine-3'-phosphate
  modified_base 21: mod_base = OTHER; note = 2'-O-methyluridine-3'-phosphate ((2S,4R)-1-[29-[[2-(acetylamino)-2-deoxy-beta-D-galactopyra nosyl]oxy]-14,14-bis[[3-[[3-[[5-[[2-(acetylamino)-2-deoxy-b eta-D-galactopyranosyl]oxy]-1-oxopentyl]amino]propyl]amino] -3-oxopropoxy]methyl]-1,12,19,25-tetraoxo-16-oxa-13,20,24-t riazanonacos-1-yl]-4-hydroxy-2-pyrrolidinyl)methyl ester
cttatccctccttccttcagt

SEQ ID NO: 625 - RNA, 21 nt, synthetic construct
  source 1..21: mol_type = other RNA
  modified_base 1: mod_base = OTHER; note = 2'-O-methyluridine-3'-phosphorothioate
  modified_base 2: mod_base = OTHER; note = 2'-O-methyluridine-3'-phosphorothioate
  modified_base 3: mod_base = OTHER; note = 2'-O-methyladenosine-3'-phosphate
  modified_base 4: mod_base = OTHER; note = 2'-O-methyluridine-3'-phosphate
  modified_base 5: mod_base = OTHER; note = 2'-O-methylcytidine-3'-phosphate
  modified_base 6: mod_base = OTHER; note = 2'-O-methylcytidine-3'-phosphate
  modified_base 7: mod_base = OTHER; note = 2'-deoxy-2'-fluorocytidine-3'-phosphate
  modified_base 8: mod_base = OTHER; note = 2'-O-methyluridine-3'-phosphate
  modified_base 9: mod_base = OTHER; note = 2'-deoxy-2'-fluorocytidine-3'-phosphate
  modified_base 10: mod_base = OTHER; note = 2'-deoxy-2'-fluorocytidine-3'-phosphate
  modified_base 11: mod_base = OTHER; note = 2'-deoxy-2'-fluorouridine-3'-phosphate
  modified_base 12: mod_base = OTHER; note = 2'-O-methyluridine-3'-phosphate
  modified_base 13: mod_base = OTHER; note = 2'-O-methylcytidine-3'-phosphate
  modified_base 14: mod_base = OTHER; note = 2'-O-methylcytidine-3'-phosphate
  modified_base 15: mod_base = OTHER; note = 2'-O-methyluridine-3'-phosphate
  modified_base 16: mod_base = OTHER; note = 2'-O-methyluridine-3'-phosphate
  modified_base 17: mod_base = OTHER; note = 2'-O-methylcytidine-3'-phosphate
  modified_base 18: mod_base = OTHER; note = 2'-O-methyladenosine-3'-phosphate
  modified_base 19: mod_base = OTHER; note = 2'-O-methylguanosine-3'-phosphate
  modified_base 20: mod_base = OTHER; note = 2'-O-methyladenosine-3'-phosphate
  modified_base 21: mod_base = OTHER; note = 2'-O-methyluridine-3'-phosphate ((2S,4R)-1-[29-[[2-(acetylamino)-2-deoxy-beta-D-galactopyra nosyl]oxy]-14,14-bis[[3-[[3-[[5-[[2-(acetylamino)-2-deoxy-b eta-D-galactopyranosyl]oxy]-1-oxopentyl]amino]propyl]amino] -3-oxopropoxy]methyl]-1,12,19,25-tetraoxo-16-oxa-13,20,24-t riazanonacos-1-yl]-4-hydroxy-2-pyrrolidinyl)methyl ester
ttatccctccttccttcagat

SEQ ID NO: 626 - RNA, 21 nt, synthetic construct
  source 1..21: mol_type = other RNA
  modified_base 1: mod_base = OTHER; note = 2'-O-methylcytidine-3'-phosphorothioate
  modified_base 2: mod_base = OTHER; note = 2'-O-methylcytidine-3'-phosphorothioate
  modified_base 3: mod_base = OTHER; note = 2'-O-methylcytidine-3'-phosphate
  modified_base 4: mod_base = OTHER; note = 2'-O-methyluridine-3'-phosphate
  modified_base 5: mod_base = OTHER; note = 2'-O-methylcytidine-3'-phosphate
  modified_base 6: mod_base = OTHER; note = 2'-O-methylcytidine-3'-phosphate
  modified_base 7: mod_base = OTHER; note = 2'-deoxy-2'-fluorouridine-3'-phosphate
  modified_base 8: mod_base = OTHER; note = 2'-O-methyluridine-3'-phosphate
  modified_base 9: mod_base = OTHER; note = 2'-deoxy-2'-fluorocytidine-3'-phosphate
  modified_base 10: mod_base = OTHER; note = 2'-deoxy-2'-fluorocytidine-3'-phosphate
  modified_base 11: mod_base = OTHER; note = 2'-deoxy-2'-fluorouridine-3'-phosphate
  modified_base 12: mod_base = OTHER; note = 2'-O-methyluridine-3'-phosphate
  modified_base 13: mod_base = OTHER; note = 2'-O-methylcytidine-3'-phosphate
  modified_base 14: mod_base = OTHER; note = 2'-O-methyladenosine-3'-phosphate
  modified_base 15: mod_base = OTHER; note = 2'-O-methylguanosine-3'-phosphate
  modified_base 16: mod_base = OTHER; note = 2'-O-methyladenosine-3'-phosphate
  modified_base 17: mod_base = OTHER; note = 2'-O-methylguanosine-3'-phosphate
  modified_base 18: mod_base = OTHER; note = 2'-O-methylguanosine-3'-phosphate
  modified_base 19: mod_base = OTHER; note = 2'-O-methylcytidine-3'-phosphate
  modified_base 20: mod_base = OTHER; note = 2'-O-methylguanosine-3'-phosphate
  modified_base 21: mod_base = OTHER; note = 2'-O-methyluridine-3'-phosphate ((2S,4R)-1-[29-[[2-(acetylamino)-2-deoxy-beta-D-galactopyra nosyl]oxy]-14,14-bis[[3-[[3-[[5-[[2-(acetylamino)-2-deoxy-b eta-D-galactopyranosyl]oxy]-1-oxopentyl]amino]propyl]amino] -3-oxopropoxy]methyl]-1,12,19,25-tetraoxo-16-oxa-13,20,24-t riazanonacos-1-yl]-4-hydroxy-2-pyrrolidinyl)methyl ester
ccctccttccttcagaggcgt

SEQ ID NO: 627 - RNA, 21 nt, synthetic construct
  source 1..21: mol_type = other RNA
  modified_base 1: mod_base = OTHER; note = 2'-O-methylcytidine-3'-phosphorothioate
  modified_base 2: mod_base = OTHER; note = 2'-O-methylcytidine-3'-phosphorothioate
  modified_base 3: mod_base = OTHER; note = 2'-O-methyluridine-3'-phosphate
  modified_base 4: mod_base = OTHER; note = 2'-O-methylcytidine-3'-phosphate
  modified_base 5: mod_base = OTHER; note = 2'-O-methylcytidine-3'-phosphate
  modified_base 6: mod_base = OTHER; note = 2'-O-methyluridine-3'-phosphate
  modified_base 7: mod_base = OTHER; note = 2'-deoxy-2'-fluorouridine-3'-phosphate
  modified_base 8: mod_base = OTHER; note = 2'-O-methylcytidine-3'-phosphate
  modified_base 9: mod_base = OTHER; note = 2'-deoxy-2'-fluorocytidine-3'-phosphate
  modified_base 10: mod_base = OTHER; note = 2'-deoxy-2'-fluorouridine-3'-phosphate
  modified_base 11: mod_base = OTHER; note = 2'-deoxy-2'-fluorouridine-3'-phosphate
  modified_base 12: mod_base = OTHER; note = 2'-O-methylcytidine-3'-phosphate
  modified_base 13: mod_base = OTHER; note = 2'-O-methyladenosine-3'-phosphate
  modified_base 14: mod_base = OTHER; note = 2'-O-methylguanosine-3'-phosphate
  modified_base 15: mod_base = OTHER; note = 2'-O-methyladenosine-3'-phosphate
  modified_base 16: mod_base = OTHER; note = 2'-O-methylguanosine-3'-phosphate
  modified_base 17: mod_base = OTHER; note = 2'-O-methylguanosine-3'-phosphate
  modified_base 18: mod_base = OTHER; note = 2'-O-methylcytidine-3'-phosphate
  modified_base 19: mod_base = OTHER; note = 2'-O-methylguanosine-3'-phosphate
  modified_base 20: mod_base = OTHER; note = 2'-O-methyluridine-3'-phosphate
  modified_base 21: mod_base = OTHER; note = 2'-O-methyluridine-3'-phosphate ((2S,4R)-1-[29-[[2-(acetylamino)-2-deoxy-beta-D-galactopyra nosyl]oxy]-14,14-bis[[3-[[3-[[5-[[2-(acetylamino)-2-deoxy-b eta-D-galactopyranosyl]oxy]-1-oxopentyl]amino]propyl]amino] -3-oxopropoxy]methyl]-1,12,19,25-tetraoxo-16-oxa-13,20,24-t riazanonacos-1-yl]-4-hydroxy-2-pyrrolidinyl)methyl ester
cctccttccttcagaggcgtt

SEQ ID NO: 628 - RNA, 21 nt, synthetic construct
  source 1..21: mol_type = other RNA
  modified_base 1: mod_base = OTHER; note = 2'-O-methylcytidine-3'-phosphorothioate
  modified_base 2: mod_base = OTHER; note = 2'-O-methylcytidine-3'-phosphorothioate
  modified_base 3: mod_base = OTHER; note = 2'-O-methyluridine-3'-phosphate
  modified_base 4: mod_base = OTHER; note = 2'-O-methyluridine-3'-phosphate
  modified_base 5: mod_base = OTHER; note = 2'-O-methylcytidine-3'-phosphate
  modified_base 6: mod_base = OTHER; note = 2'-O-methylcytidine-3'-phosphate
  modified_base 7: mod_base = OTHER; note = 2'-deoxy-2'-fluorouridine-3'-phosphate
  modified_base 8: mod_base = OTHER; note = 2'-O-methyluridine-3'-phosphate
  modified_base 9: mod_base = OTHER; note = 2'-deoxy-2'-fluorocytidine-3'-phosphate
  modified_base 10: mod_base = OTHER; note = 2'-deoxy-2'-fluoroadenosine-3'-phosphate
  modified_base 11: mod_base = OTHER; note = 2'-deoxy-2'-fluoroguanosine-3'-phosphate
  modified_base 12: mod_base = OTHER; note = 2'-O-methyladenosine-3'-phosphate
  modified_base 13: mod_base = OTHER; note = 2'-O-methylguanosine-3'-phosphate
  modified_base 14: mod_base = OTHER; note = 2'-O-methylguanosine-3'-phosphate
  modified_base 15: mod_base = OTHER; note = 2'-O-methylcytidine-3'-phosphate
  modified_base 16: mod_base = OTHER; note = 2'-O-methylguanosine-3'-phosphate
  modified_base 17: mod_base = OTHER; note = 2'-O-methyluridine-3'-phosphate
  modified_base 18: mod_base = OTHER; note = 2'-O-methylguanosine-3'-phosphate
  modified_base 19: mod_base = OTHER; note = 2'-O-methylcytidine-3'-phosphate
  modified_base 20: mod_base = OTHER; note = 2'-O-methylguanosine-3'-phosphate
  modified_base 21: mod_base = OTHER; note = 2'-O-methyluridine-3'-phosphate ((2S,4R)-1-[29-[[2-(acetylamino)-2-deoxy-beta-D-galactopyra nosyl]oxy]-14,14-bis[[3-[[3-[[5-[[2-(acetylamino)-2-deoxy-b eta-D-galactopyranosyl]oxy]-1-oxopentyl]amino]propyl]amino] -3-oxopropoxy]methyl]-1,12,19,25-tetraoxo-16-oxa-13,20,24-t riazanonacos-1-yl]-4-hydroxy-2-pyrrolidinyl)methyl ester
ccttccttcagaggcgtgcgt

SEQ ID NO: 629 - RNA, 21 nt, synthetic construct
  source 1..21: mol_type = other RNA
  modified_base 1: mod_base = OTHER; note = 2'-O-methyluridine-3'-phosphorothioate
  modified_base 2: mod_base = OTHER; note = 2'-O-methylcytidine-3'-phosphorothioate
  modified_base 3: mod_base = OTHER; note = 2'-O-methylcytidine-3'-phosphate
  modified_base 4: mod_base = OTHER; note = 2'-O-methyluridine-3'-phosphate
  modified_base 5: mod_base = OTHER; note = 2'-O-methyluridine-3'-phosphate
  modified_base 6: mod_base = OTHER; note = 2'-O-methylcytidine-3'-phosphate
  modified_base 7: mod_base = OTHER; note = 2'-deoxy-2'-fluoroadenosine-3'-phosphate
  modified_base 8: mod_base = OTHER; note = 2'-O-methylguanosine-3'-phosphate
  modified_base 9: mod_base = OTHER; note = 2'-deoxy-2'-fluoroadenosine-3'-phosphate
  modified_base 10: mod_base = OTHER; note = 2'-deoxy-2'-fluoroguanosine-3'-phosphate
  modified_base 11: mod_base = OTHER; note = 2'-deoxy-2'-fluoroguanosine-3'-phosphate
  modified_base 12: mod_base = OTHER; note = 2'-O-methylcytidine-3'-phosphate
  modified_base 13: mod_base = OTHER; note = 2'-O-methylguanosine-3'-phosphate
  modified_base 14: mod_base = OTHER; note = 2'-O-methyluridine-3'-phosphate
  modified_base 15: mod_base = OTHER; note = 2'-O-methylguanosine-3'-phosphate
  modified_base 16: mod_base = OTHER; note = 2'-O-methylcytidine-3'-phosphate
  modified_base 17: mod_base = OTHER; note = 2'-O-methylguanosine-3'-phosphate
  modified_base 18: mod_base = OTHER; note = 2'-O-methyladenosine-3'-phosphate
  modified_base 19: mod_base = OTHER; note = 2'-O-methyluridine-3'-phosphate
  modified_base 20: mod_base = OTHER; note = 2'-O-methyladenosine-3'-phosphate
  modified_base 21: mod_base = OTHER; note = 2'-O-methyluridine-3'-phosphate ((2S,4R)-1-[29-[[2-(acetylamino)-2-deoxy-beta-D-galactopyra nosyl]oxy]-14,14-bis[[3-[[3-[[5-[[2-(acetylamino)-2-deoxy-b eta-D-galactopyranosyl]oxy]-1-oxopentyl]amino]propyl]amino] -3-oxopropoxy]methyl]-1,12,19,25-tetraoxo-16-oxa-13,20,24-t riazanonacos-1-yl]-4-hydroxy-2-pyrrolidinyl)methyl ester
tccttcagaggcgtgcgatat

SEQ ID NO: 630 - RNA, 21 nt, synthetic construct
  source 1..21: mol_type = other RNA
  modified_base 1: mod_base = OTHER; note = 2'-O-methylcytidine-3'-phosphorothioate
  modified_base 2: mod_base = OTHER; note = 2'-O-methyluridine-3'-phosphorothioate
  modified_base 3: mod_base = OTHER; note = 2'-O-methyluridine-3'-phosphate
  modified_base 4: mod_base = OTHER; note = 2'-O-methylcytidine-3'-phosphate
  modified_base 5: mod_base = OTHER; note = 2'-O-methyladenosine-3'-phosphate
  modified_base 6: mod_base = OTHER; note = 2'-O-methylguanosine-3'-phosphate
  modified_base 7: mod_base = OTHER; note = 2'-deoxy-2'-fluoroadenosine-3'-phosphate
  modified_base 8: mod_base = OTHER; note = 2'-O-methylguanosine-3'-phosphate
  modified_base 9: mod_base = OTHER; note = 2'-deoxy-2'-fluoroguanosine-3'-phosphate
  modified_base 10: mod_base = OTHER; note = 2'-deoxy-2'-fluorocytidine-3'-phosphate
  modified_base 11: mod_base = OTHER; note = 2'-deoxy-2'-fluoroguanosine-3'-phosphate
  modified_base 12: mod_base = OTHER; note = 2'-O-methyluridine-3'-phosphate
  modified_base 13: mod_base = OTHER; note = 2'-O-methylguanosine-3'-phosphate
  modified_base 14: mod_base = OTHER; note = 2'-O-methylcytidine-3'-phosphate
  modified_base 15: mod_base = OTHER; note = 2'-O-methylguanosine-3'-phosphate
  modified_base 16: mod_base = OTHER; note = 2'-O-methyladenosine-3'-phosphate
  modified_base 17: mod_base = OTHER; note = 2'-O-methyluridine-3'-phosphate
  modified_base 18: mod_base = OTHER; note = 2'-O-methyladenosine-3'-phosphate
  modified_base 19: mod_base = OTHER; note = 2'-O-methyluridine-3'-phosphate
  modified_base 20: mod_base = OTHER; note = 2'-O-methylguanosine-3'-phosphate
  modified_base 21: mod_base = OTHER; note = 2'-O-methyluridine-3'-phosphate ((2S,4R)-1-[29-[[2-(acetylamino)-2-deoxy-beta-D-galactopyra nosyl]oxy]-14,14-bis[[3-[[3-[[5-[[2-(acetylamino)-2-deoxy-b eta-D-galactopyranosyl]oxy]-1-oxopentyl]amino]propyl]amino] -3-oxopropoxy]methyl]-1,12,19,25-tetraoxo-16-oxa-13,20,24-t riazanonacos-1-yl]-4-hydroxy-2-pyrrolidinyl)methyl ester
cttcagaggcgtgcgatatgt

SEQ ID NO: 631 - RNA, 21 nt, synthetic construct
  source 1..21: mol_type = other RNA
  modified_base 1: mod_base = OTHER; note = 2'-O-methyluridine-3'-phosphorothioate
  modified_base 2: mod_base = OTHER; note = 2'-O-methyluridine-3'-phosphorothioate
  modified_base 3: mod_base = OTHER; note = 2'-O-methylcytidine-3'-phosphate
  modified_base 4: mod_base = OTHER; note = 2'-O-methyladenosine-3'-phosphate
  modified_base 5: mod_base = OTHER; note = 2'-O-methylguanosine-3'-phosphate
  modified_base 6: mod_base = OTHER; note = 2'-O-methyladenosine-3'-phosphate
  modified_base 7: mod_base = OTHER; note = 2'-deoxy-2'-fluoroguanosine-3'-phosphate
  modified_base 8: mod_base = OTHER; note = 2'-O-methylguanosine-3'-phosphate
  modified_base 9: mod_base = OTHER; note = 2'-deoxy-2'-fluorocytidine-3'-phosphate
  modified_base 10: mod_base = OTHER; note = 2'-deoxy-2'-fluoroguanosine-3'-phosphate
  modified_base 11: mod_base = OTHER; note = 2'-deoxy-2'-fluorouridine-3'-phosphate
  modified_base 12: mod_base = OTHER; note = 2'-O-methylguanosine-3'-phosphate
  modified_base 13: mod_base = OTHER; note = 2'-O-methylcytidine-3'-phosphate
  modified_base 14: mod_base = OTHER; note = 2'-O-methylguanosine-3'-phosphate
  modified_base 15: mod_base = OTHER; note = 2'-O-methyladenosine-3'-phosphate
  modified_base 16: mod_base = OTHER; note = 2'-O-methyluridine-3'-phosphate
  modified_base 17: mod_base = OTHER; note = 2'-O-methyladenosine-3'-phosphate
  modified_base 18: mod_base = OTHER; note = 2'-O-methyluridine-3'-phosphate
  modified_base 19: mod_base = OTHER; note = 2'-O-methylguanosine-3'-phosphate
  modified_base 20: mod_base = OTHER; note = 2'-O-methyluridine-3'-phosphate
  modified_base 21: mod_base = OTHER; note = 2'-O-methyluridine-3'-phosphate ((2S,4R)-1-[29-[[2-(acetylamino)-2-deoxy-beta-D-galactopyra nosyl]oxy]-14,14-bis[[3-[[3-[[5-[[2-(acetylamino)-2-deoxy-b eta-D-galactopyranosyl]oxy]-1-oxopentyl]amino]propyl]amino] -3-oxopropoxy]methyl]-1,12,19,25-tetraoxo-16-oxa-13,20,24-t riazanonacos-1-yl]-4-hydroxy-2-pyrrolidinyl)methyl ester
ttcagaggcgtgcgatatgtt

SEQ ID NO: 632 - RNA, 21 nt, synthetic construct
  source 1..21: mol_type = other RNA
  modified_base 1: mod_base = OTHER; note = 2'-O-methyluridine-3'-phosphorothioate
  modified_base 2: mod_base = OTHER; note = 2'-O-methylcytidine-3'-phosphorothioate
  modified_base 3: mod_base = OTHER; note = 2'-O-methyladenosine-3'-phosphate
  modified_base 4: mod_base = OTHER; note = 2'-O-methylguanosine-3'-phosphate
  modified_base 5: mod_base = OTHER; note = 2'-O-methyladenosine-3'-phosphate
  modified_base 6: mod_base = OTHER; note = 2'-O-methylguanosine-3'-phosphate
  modified_base 7: mod_base = OTHER; note = 2'-deoxy-2'-fluoroguanosine-3'-phosphate
  modified_base 8: mod_base = OTHER; note = 2'-O-methylcytidine-3'-phosphate
  modified_base 9: mod_base = OTHER; note = 2'-deoxy-2'-fluoroguanosine-3'-phosphate
  modified_base 10: mod_base = OTHER; note = 2'-deoxy-2'-fluorouridine-3'-phosphate
  modified_base 11: mod_base = OTHER; note = 2'-deoxy-2'-fluoroguanosine-3'-phosphate
  modified_base 12: mod_base = OTHER; note = 2'-O-methylcytidine-3'-phosphate
  modified_base 13: mod_base = OTHER; note = 2'-O-methylguanosine-3'-phosphate
  modified_base 14: mod_base = OTHER; note = 2'-O-methyladenosine-3'-phosphate
  modified_base 15: mod_base = OTHER; note = 2'-O-methyluridine-3'-phosphate
  modified_base 16: mod_base = OTHER; note = 2'-O-methyladenosine-3'-phosphate
  modified_base 17: mod_base = OTHER; note = 2'-O-methyluridine-3'-phosphate
  modified_base 18: mod_base = OTHER; note = 2'-O-methylguanosine-3'-phosphate
  modified_base 19: mod_base = OTHER; note = 2'-O-methyluridine-3'-phosphate
  modified_base 20: mod_base = OTHER; note = 2'-O-methylguanosine-3'-phosphate
  modified_base 21: mod_base = OTHER; note = 2'-O-methyluridine-3'-phosphate ((2S,4R)-1-[29-[[2-(acetylamino)-2-deoxy-beta-D-galactopyra nosyl]oxy]-14,14-bis[[3-[[3-[[5-[[2-(acetylamino)-2-deoxy-b eta-D-galactopyranosyl]oxy]-1-oxopentyl]amino]propyl]amino] -3-oxopropoxy]methyl]-1,12,19,25-tetraoxo-16-oxa-13,20,24-t riazanonacos-1-yl]-4-hydroxy-2-pyrrolidinyl)methyl ester
tcagaggcgtgcgatatgtgt

SEQ ID NO: 633 - RNA, 21 nt, synthetic construct
  source 1..21: mol_type = other RNA
  modified_base 1: mod_base = OTHER; note = 2'-O-methylcytidine-3'-phosphorothioate
  modified_base 2: mod_base = OTHER; note = 2'-O-methyladenosine-3'-phosphorothioate
  modified_base 3: mod_base = OTHER; note = 2'-O-methylguanosine-3'-phosphate
  modified_base 4: mod_base = OTHER; note = 2'-O-methyladenosine-3'-phosphate
  modified_base 5: mod_base = OTHER; note = 2'-O-methylguanosine-3'-phosphate
  modified_base 6: mod_base = OTHER; note = 2'-O-methylguanosine-3'-phosphate
  modified_base 7: mod_base = OTHER; note = 2'-deoxy-2'-fluorocytidine-3'-phosphate
  modified_base 8: mod_base = OTHER; note = 2'-O-methylguanosine-3'-phosphate
  modified_base 9: mod_base = OTHER; note = 2'-deoxy-2'-fluorouridine-3'-phosphate
  modified_base 10: mod_base = OTHER; note = 2'-deoxy-2'-fluoroguanosine-3'-phosphate
  modified_base 11: mod_base = OTHER; note = 2'-deoxy-2'-fluorocytidine-3'-phosphate
  modified_base 12: mod_base = OTHER; note = 2'-O-methylguanosine-3'-phosphate
  modified_base 13: mod_base = OTHER; note = 2'-O-methyladenosine-3'-phosphate
  modified_base 14: mod_base = OTHER; note = 2'-O-methyluridine-3'-phosphate
  modified_base 15: mod_base = OTHER; note = 2'-O-methyladenosine-3'-phosphate
  modified_base 16: mod_base = OTHER; note = 2'-O-methyluridine-3'-phosphate
  modified_base 17: mod_base = OTHER; note = 2'-O-methylguanosine-3'-phosphate
  modified_base 18: mod_base = OTHER; note = 2'-O-methyluridine-3'-phosphate
  modified_base 19: mod_base = OTHER; note = 2'-O-methylguanosine-3'-phosphate
  modified_base 20: mod_base = OTHER; note = 2'-O-methylguanosine-3'-phosphate
  modified_base 21: mod_base = OTHER; note = 2'-O-methyluridine-3'-phosphate ((2S,4R)-1-[29-[[2-(acetylamino)-2-deoxy-beta-D-galactopyra nosyl]oxy]-14,14-bis[[3-[[3-[[5-[[2-(acetylamino)-2-deoxy-b eta-D-galactopyranosyl]oxy]-1-oxopentyl]amino]propyl]amino] -3-oxopropoxy]methyl]-1,12,19,25-tetraoxo-16-oxa-13,20,24-t riazanonacos-1-yl]-4-hydroxy-2-pyrrolidinyl)methyl ester
cagaggcgtgcgatatgtggt

SEQ ID NO: 634 - RNA, 21 nt, synthetic construct
  source 1..21: mol_type = other RNA
  modified_base 1: mod_base = OTHER; note = 2'-O-methyladenosine-3'-phosphorothioate
  modified_base 2: mod_base = OTHER; note = 2'-O-methylguanosine-3'-phosphorothioate
  modified_base 3: mod_base = OTHER; note = 2'-O-methyladenosine-3'-phosphate
  modified_base 4: mod_base = OTHER; note = 2'-O-methylguanosine-3'-phosphate
  modified_base 5: mod_base = OTHER; note = 2'-O-methylguanosine-3'-phosphate
  modified_base 6: mod_base = OTHER; note = 2'-O-methylcytidine-3'-phosphate
  modified_base 7: mod_base = OTHER; note = 2'-deoxy-2'-fluoroguanosine-3'-phosphate
  modified_base 8: mod_base = OTHER; note = 2'-O-methyluridine-3'-phosphate
  modified_base 9: mod_base = OTHER; note = 2'-deoxy-2'-fluoroguanosine-3'-phosphate
  modified_base 10: mod_base = OTHER; note = 2'-deoxy-2'-fluorocytidine-3'-phosphate
  modified_base 11: mod_base = OTHER; note = 2'-deoxy-2'-fluoroguanosine-3'-phosphate
  modified_base 12: mod_base = OTHER; note = 2'-O-methyladenosine-3'-phosphate
  modified_base 13: mod_base = OTHER; note = 2'-O-methyluridine-3'-phosphate
  modified_base 14: mod_base = OTHER; note = 2'-O-methyladenosine-3'-phosphate
  modified_base 15: mod_base = OTHER; note = 2'-O-methyluridine-3'-phosphate
  modified_base 16: mod_base = OTHER; note = 2'-O-methylguanosine-3'-phosphate
  modified_base 17: mod_base = OTHER; note = 2'-O-methyluridine-3'-phosphate
  modified_base 18: mod_base = OTHER; note = 2'-O-methylguanosine-3'-phosphate
  modified_base 19: mod_base = OTHER; note = 2'-O-methylguanosine-3'-phosphate
  modified_base 20: mod_base = OTHER; note = 2'-O-methyladenosine-3'-phosphate
  modified_base 21: mod_base = OTHER; note = 2'-O-methyluridine-3'-phosphate ((2S,4R)-1-[29-[[2-(acetylamino)-2-deoxy-beta-D-galactopyra nosyl]oxy]-14,14-bis[[3-[[3-[[5-[[2-(acetylamino)-2-deoxy-b eta-D-galactopyranosyl]oxy]-1-oxopentyl]amino]propyl]amino] -3-oxopropoxy]methyl]-1,12,19,25-tetraoxo-16-oxa-13,20,24-t riazanonacos-1-yl]-4-hydroxy-2-pyrrolidinyl)methyl ester
agaggcgtgcgatatgtggat

SEQ ID NO: 635 - RNA, 21 nt, synthetic construct
  source 1..21: mol_type = other RNA
  modified_base 1: mod_base = OTHER; note = 2'-O-methyladenosine-3'-phosphorothioate
  modified_base 2: mod_base = OTHER; note = 2'-O-methylguanosine-3'-phosphorothioate
  modified_base 3: mod_base = OTHER; note = 2'-O-methylguanosine-3'-phosphate
  modified_base 4: mod_base = OTHER; note = 2'-O-methylcytidine-3'-phosphate
  modified_base 5: mod_base = OTHER; note = 2'-O-methylguanosine-3'-phosphate
  modified_base 6: mod_base = OTHER; note = 2'-O-methyluridine-3'-phosphate
  modified_base 7: mod_base = OTHER; note = 2'-deoxy-2'-fluoroguanosine-3'-phosphate
  modified_base 8: mod_base = OTHER; note = 2'-O-methylcytidine-3'-phosphate
  modified_base 9: mod_base = OTHER; note = 2'-deoxy-2'-fluoroguanosine-3'-phosphate
  modified_base 10: mod_base = OTHER; note = 2'-deoxy-2'-fluoroadenosine-3'-phosphate
  modified_base 11: mod_base = OTHER; note = 2'-deoxy-2'-fluorouridine-3'-phosphate
  modified_base 12: mod_base = OTHER; note = 2'-O-methyladenosine-3'-phosphate
  modified_base 13: mod_base = OTHER; note = 2'-O-methyluridine-3'-phosphate
  modified_base 14: mod_base = OTHER; note = 2'-O-methylguanosine-3'-phosphate
  modified_base 15: mod_base = OTHER; note = 2'-O-methyluridine-3'-phosphate
  modified_base 16: mod_base = OTHER; note = 2'-O-methylguanosine-3'-phosphate
  modified_base 17: mod_base = OTHER; note = 2'-O-methylguanosine-3'-phosphate
  modified_base 18: mod_base = OTHER; note = 2'-O-methyladenosine-3'-phosphate
  modified_base 19: mod_base = OTHER; note = 2'-O-methyluridine-3'-phosphate
  modified_base 20: mod_base = OTHER; note = 2'-O-methylguanosine-3'-phosphate
  modified_base 21: mod_base = OTHER; note = 2'-O-methyluridine-3'-phosphate ((2S,4R)-1-[29-[[2-(acetylamino)-2-deoxy-beta-D-galactopyra nosyl]oxy]-14,14-bis[[3-[[3-[[5-[[2-(acetylamino)-2-deoxy-b eta-D-galactopyranosyl]oxy]-1-oxopentyl]amino]propyl]amino] -3-oxopropoxy]methyl]-1,12,19,25-tetraoxo-16-oxa-13,20,24-t riazanonacos-1-yl]-4-hydroxy-2-pyrrolidinyl)methyl ester
aggcgtgcgatatgtggatgt

SEQ ID NO: 636 - RNA, 21 nt, synthetic construct
  source 1..21: mol_type = other RNA
  modified_base 1: mod_base = OTHER; note = 2'-O-methylguanosine-3'-phosphorothioate
  modified_base 2: mod_base = OTHER; note = 2'-O-methylguanosine-3'-phosphorothioate
  modified_base 3: mod_base = OTHER; note = 2'-O-methylcytidine-3'-phosphate
  modified_base 4: mod_base = OTHER; note = 2'-O-methylguanosine-3'-phosphate
  modified_base 5: mod_base = OTHER; note = 2'-O-methyluridine-3'-phosphate
  modified_base 6: mod_base = OTHER; note = 2'-O-methylguanosine-3'-phosphate
  modified_base 7: mod_base = OTHER; note = 2'-deoxy-2'-fluorocytidine-3'-phosphate
  modified_base 8: mod_base = OTHER; note = 2'-O-methylguanosine-3'-phosphate
  modified_base 9: mod_base = OTHER; note = 2'-deoxy-2'-fluoroadenosine-3'-phosphate
  modified_base 10: mod_base = OTHER; note = 2'-deoxy-2'-fluorouridine-3'-phosphate
  modified_base 11: mod_base = OTHER; note = 2'-deoxy-2'-fluoroadenosine-3'-phosphate
  modified_base 12: mod_base = OTHER; note = 2'-O-methyluridine-3'-phosphate
  modified_base 13: mod_base = OTHER; note = 2'-O-methylguanosine-3'-phosphate
  modified_base 14: mod_base = OTHER; note = 2'-O-methyluridine-3'-phosphate
  modified_base 15: mod_base = OTHER; note = 2'-O-methylguanosine-3'-phosphate
  modified_base 16: mod_base = OTHER; note = 2'-O-methylguanosine-3'-phosphate
  modified_base 17: mod_base = OTHER; note = 2'-O-methyladenosine-3'-phosphate
  modified_base 18: mod_base = OTHER; note = 2'-O-methyluridine-3'-phosphate
  modified_base 19: mod_base = OTHER; note = 2'-O-methylguanosine-3'-phosphate
  modified_base 20: mod_base = OTHER; note = 2'-O-methylguanosine-3'-phosphate
  modified_base 21: mod_base = OTHER; note = 2'-O-methyluridine-3'-phosphate ((2S,4R)-1-[29-[[2-(acetylamino)-2-deoxy-beta-D-galactopyra nosyl]oxy]-14,14-bis[[3-[[3-[[5-[[2-(acetylamino)-2-deoxy-b eta-D-galactopyranosyl]oxy]-1-oxopentyl]amino]propyl]amino] -3-oxopropoxy]methyl]-1,12,19,25-tetraoxo-16-oxa-13,20,24-t riazanonacos-1-yl]-4-hydroxy-2-pyrrolidinyl)methyl ester
ggcgtgcgatatgtggatggt

SEQ ID NO: 637 - RNA, 21 nt, synthetic construct
  source 1..21: mol_type = other RNA
  modified_base 1: mod_base = OTHER; note = 2'-O-methylcytidine-3'-phosphorothioate
  modified_base 2: mod_base = OTHER; note = 2'-O-methylguanosine-3'-phosphorothioate
  modified_base 3: mod_base = OTHER; note = 2'-O-methyluridine-3'-phosphate
  modified_base 4: mod_base = OTHER; note = 2'-O-methylguanosine-3'-phosphate
  modified_base 5: mod_base = OTHER; note = 2'-O-methylcytidine-3'-phosphate
  modified_base 6: mod_base = OTHER; note = 2'-O-methylguanosine-3'-phosphate
  modified_base 7: mod_base = OTHER; note = 2'-deoxy-2'-fluoroadenosine-3'-phosphate
  modified_base 8: mod_base = OTHER; note = 2'-O-methyluridine-3'-phosphate
  modified_base 9: mod_base = OTHER; note = 2'-deoxy-2'-fluoroadenosine-3'-phosphate
  modified_base 10: mod_base = OTHER; note = 2'-deoxy-2'-fluorouridine-3'-phosphate
  modified_base 11: mod_base = OTHER; note = 2'-deoxy-2'-fluoroguanosine-3'-phosphate
  modified_base 12: mod_base = OTHER; note = 2'-O-methyluridine-3'-phosphate
  modified_base 13: mod_base = OTHER; note = 2'-O-methylguanosine-3'-phosphate
  modified_base 14: mod_base = OTHER; note = 2'-O-methylguanosine-3'-phosphate
  modified_base 15: mod_base = OTHER; note = 2'-O-methyladenosine-3'-phosphate
  modified_base 16: mod_base = OTHER; note = 2'-O-methyluridine-3'-phosphate
  modified_base 17: mod_base = OTHER; note = 2'-O-methylguanosine-3'-phosphate
  modified_base 18: mod_base = OTHER; note = 2'-O-methylguanosine-3'-phosphate
  modified_base 19: mod_base = OTHER; note = 2'-O-methyladenosine-3'-phosphate
  modified_base 20: mod_base = OTHER; note = 2'-O-methylguanosine-3'-phosphate
  modified_base 21: mod_base = OTHER; note = 2'-O-methyluridine-3'-phosphate ((2S,4R)-1-[29-[[2-(acetylamino)-2-deoxy-beta-D-galactopyra nosyl]oxy]-14,14-bis[[3-[[3-[[5-[[2-(acetylamino)-2-deoxy-b eta-D-galactopyranosyl]oxy]-1-oxopentyl]amino]propyl]amino] -3-oxopropoxy]methyl]-1,12,19,25-tetraoxo-16-oxa-13,20,24-t riazanonacos-1-yl]-4-hydroxy-2-pyrrolidinyl)methyl ester
cgtgcgatatgtggatggagt

SEQ ID NO: 638 - RNA, 21 nt, synthetic construct
  source 1..21: mol_type = other RNA
  modified_base 1: mod_base = OTHER; note = 2'-O-methylguanosine-3'-phosphorothioate
  modified_base 2: mod_base = OTHER; note = 2'-O-methyluridine-3'-phosphorothioate
  modified_base 3: mod_base = OTHER; note = 2'-O-methylguanosine-3'-phosphate
  modified_base 4: mod_base = OTHER; note = 2'-O-methylcytidine-3'-phosphate
  modified_base 5: mod_base = OTHER; note = 2'-O-methylguanosine-3'-phosphate
  modified_base 6: mod_base = OTHER; note = 2'-O-methyladenosine-3'-phosphate
  modified_base 7: mod_base = OTHER; note = 2'-deoxy-2'-fluorouridine-3'-phosphate
  modified_base 8: mod_base = OTHER; note = 2'-O-methyladenosine-3'-phosphate
  modified_base 9: mod_base = OTHER; note = 2'-deoxy-2'-fluorouridine-3'-phosphate
  modified_base 10: mod_base = OTHER; note = 2'-deoxy-2'-fluoroguanosine-3'-phosphate
  modified_base 11: mod_base = OTHER; note = 2'-deoxy-2'-fluorouridine-3'-phosphate
  modified_base 12: mod_base = OTHER; note = 2'-O-methylguanosine-3'-phosphate
  modified_base 13: mod_base = OTHER; note = 2'-O-methylguanosine-3'-phosphate
  modified_base 14: mod_base = OTHER; note = 2'-O-methyladenosine-3'-phosphate
  modified_base 15: mod_base = OTHER; note = 2'-O-methyluridine-3'-phosphate
  modified_base 16: mod_base = OTHER; note = 2'-O-methylguanosine-3'-phosphate
  modified_base 17: mod_base = OTHER; note = 2'-O-methylguanosine-3'-phosphate
  modified_base 18: mod_base = OTHER; note = 2'-O-methyladenosine-3'-phosphate
  modified_base 19: mod_base = OTHER; note = 2'-O-methylguanosine-3'-phosphate
  modified_base 20: mod_base = OTHER; note = 2'-O-methylguanosine-3'-phosphate
  modified_base 21: mod_base = OTHER; note = 2'-O-methyluridine-3'-phosphate ((2S,4R)-1-[29-[[2-(acetylamino)-2-deoxy-beta-D-galactopyra nosyl]oxy]-14,14-bis[[3-[[3-[[5-[[2-(acetylamino)-2-deoxy-b eta-D-galactopyranosyl]oxy]-1-oxopentyl]amino]propyl]amino] -3-oxopropoxy]methyl]-1,12,19,25-tetraoxo-16-oxa-13,20,24-t riazanonacos-1-yl]-4-hydroxy-2-pyrrolidinyl)methyl ester
gtgcgatatgtggatggaggt

SEQ ID NO: 639 - RNA, 21 nt, synthetic construct
  source 1..21: mol_type = other RNA
  modified_base 1: mod_base = OTHER; note = 2'-O-methylguanosine-3'-phosphorothioate
  modified_base 2: mod_base = OTHER; note = 2'-O-methyluridine-3'-phosphorothioate
  modified_base 3: mod_base = OTHER; note = 2'-O-methylguanosine-3'-phosphate
  modified_base 4: mod_base = OTHER; note = 2'-O-methyladenosine-3'-phosphate
  modified_base 5: mod_base = OTHER; note = 2'-O-methylguanosine-3'-phosphate
  modified_base 6: mod_base = OTHER; note = 2'-O-methyluridine-3'-phosphate
  modified_base 7: mod_base = OTHER; note = 2'-deoxy-2'-fluoroguanosine-3'-phosphate
  modified_base 8: mod_base = OTHER; note = 2'-O-methyladenosine-3'-phosphate
  modified_base 9: mod_base = OTHER; note = 2'-deoxy-2'-fluorocytidine-3'-phosphate
  modified_base 10: mod_base = OTHER; note = 2'-deoxy-2'-fluoroadenosine-3'-phosphate
  modified_base 11: mod_base = OTHER; note = 2'-deoxy-2'-fluoroadenosine-3'-phosphate
  modified_base 12: mod_base = OTHER; note = 2'-O-methylcytidine-3'-phosphate
  modified_base 13: mod_base = OTHER; note = 2'-O-methylguanosine-3'-phosphate
  modified_base 14: mod_base = OTHER; note = 2'-O-methyluridine-3'-phosphate
  modified_base 15: mod_base = OTHER; note = 2'-O-methyladenosine-3'-phosphate
  modified_base 16: mod_base = OTHER; note = 2'-O-methylcytidine-3'-phosphate
  modified_base 17: mod_base = OTHER; note = 2'-O-methylcytidine-3'-phosphate
  modified_base 18: mod_base = OTHER; note = 2'-O-methylcytidine-3'-phosphate
  modified_base 19: mod_base = OTHER; note = 2'-O-methyluridine-3'-phosphate
  modified_base 20: mod_base = OTHER; note = 2'-O-methyluridine-3'-phosphate
  modified_base 21: mod_base = OTHER; note = 2'-O-methyluridine-3'-phosphate ((2S,4R)-1-[29-[[2-(acetylamino)-2-deoxy-beta-D-galactopyra nosyl]oxy]-14,14-bis[[3-[[3-[[5-[[2-(acetylamino)-2-deoxy-b eta-D-galactopyranosyl]oxy]-1-oxopentyl]amino]propyl]amino] -3-oxopropoxy]methyl]-1,12,19,25-tetraoxo-16-oxa-13,20,24-t riazanonacos-1-yl]-4-hydroxy-2-pyrrolidinyl)methyl ester
gtgagtgacaacgtacccttt

SEQ ID NO: 640 - RNA, 21 nt, synthetic construct
  source 1..21: mol_type = other RNA
  modified_base 1: mod_base = OTHER; note = 2'-O-methyladenosine-3'-phosphorothioate
  modified_base 2: mod_base = OTHER; note = 2'-O-methylguanosine-3'-phosphorothioate
  modified_base 3: mod_base = OTHER; note = 2'-O-methyluridine-3'-phosphate
  modified_base 4: mod_base = OTHER; note = 2'-O-methylguanosine-3'-phosphate
  modified_base 5: mod_base = OTHER; note = 2'-O-methyladenosine-3'-phosphate
  modified_base 6: mod_base = OTHER; note = 2'-O-methylcytidine-3'-phosphate
  modified_base 7: mod_base = OTHER; note = 2'-deoxy-2'-fluoroadenosine-3'-phosphate
  modified_base 8: mod_base = OTHER; note = 2'-O-methyladenosine-3'-phosphate
  modified_base 9: mod_base = OTHER; note = 2'-deoxy-2'-fluorocytidine-3'-phosphate
  modified_base 10: mod_base = OTHER; note = 2'-deoxy-2'-fluoroguanosine-3'-phosphate
  modified_base 11: mod_base = OTHER; note = 2'-deoxy-2'-fluorouridine-3'-phosphate
  modified_base 12: mod_base = OTHER; note = 2'-O-methyladenosine-3'-phosphate
  modified_base 13: mod_base = OTHER; note = 2'-O-methylcytidine-3'-phosphate
  modified_base 14: mod_base = OTHER; note = 2'-O-methylcytidine-3'-phosphate
  modified_base 15: mod_base = OTHER; note = 2'-O-methylcytidine-3'-phosphate
  modified_base 16: mod_base = OTHER; note = 2'-O-methyluridine-3'-phosphate
  modified_base 17: mod_base = OTHER; note = 2'-O-methyluridine-3'-phosphate
  modified_base 18: mod_base = OTHER; note = 2'-O-methylcytidine-3'-phosphate
  modified_base 19: mod_base = OTHER; note = 2'-O-methyladenosine-3'-phosphate
  modified_base 20: mod_base = OTHER; note = 2'-O-methyluridine-3'-phosphate
  modified_base 21: mod_base = OTHER; note = 2'-O-methyluridine-3'-phosphate ((2S,4R)-1-[29-[[2-(acetylamino)-2-deoxy-beta-D-galactopyra nosyl]oxy]-14,14-bis[[3-[[3-[[5-[[2-(acetylamino)-2-deoxy-b eta-D-galactopyranosyl]oxy]-1-oxopentyl]amino]propyl]amino] -3-oxopropoxy]methyl]-1,12,19,25-tetraoxo-16-oxa-13,20,24-t riazanonacos-1-yl]-4-hydroxy-2-pyrrolidinyl)methyl ester
agtgacaacgtacccttcatt

SEQ ID NO: 641 - RNA, 21 nt, synthetic construct
  source 1..21: mol_type = other RNA
  modified_base 1: mod_base = OTHER; note = 2'-O-methylguanosine-3'-phosphorothioate
  modified_base 2: mod_base = OTHER; note = 2'-O-methyluridine-3'-phosphorothioate
  modified_base 3: mod_base = OTHER; note = 2'-O-methylguanosine-3'-phosphate
  modified_base 4: mod_base = OTHER; note = 2'-O-methyladenosine-3'-phosphate
  modified_base 5: mod_base = OTHER; note = 2'-O-methylcytidine-3'-phosphate
  modified_base 6: mod_base = OTHER; note = 2'-O-methyladenosine-3'-phosphate
  modified_base 7: mod_base = OTHER; note = 2'-deoxy-2'-fluoroadenosine-3'-phosphate
  modified_base 8: mod_base = OTHER; note = 2'-O-methylcytidine-3'-phosphate
  modified_base 9: mod_base = OTHER; note = 2'-deoxy-2'-fluoroguanosine-3'-phosphate
  modified_base 10: mod_base = OTHER; note = 2'-deoxy-2'-fluorouridine-3'-phosphate
  modified_base 11: mod_base = OTHER; note = 2'-deoxy-2'-fluoroadenosine-3'-phosphate
  modified_base 12: mod_base = OTHER; note = 2'-O-methylcytidine-3'-phosphate
  modified_base 13: mod_base = OTHER; note = 2'-O-methylcytidine-3'-phosphate
  modified_base 14: mod_base = OTHER; note = 2'-O-methylcytidine-3'-phosphate
  modified_base 15: mod_base = OTHER; note = 2'-O-methyluridine-3'-phosphate
  modified_base 16: mod_base = OTHER; note = 2'-O-methyluridine-3'-phosphate
  modified_base 17: mod_base = OTHER; note = 2'-O-methylcytidine-3'-phosphate
  modified_base 18: mod_base = OTHER; note = 2'-O-methyladenosine-3'-phosphate
  modified_base 19: mod_base = OTHER; note = 2'-O-methyluridine-3'-phosphate
  modified_base 20: mod_base = OTHER; note = 2'-O-methyluridine-3'-phosphate
  modified_base 21: mod_base = OTHER; note = 2'-O-methyluridine-3'-phosphate ((2S,4R)-1-[29-[[2-(acetylamino)-2-deoxy-beta-D-galactopyra nosyl]oxy]-14,14-bis[[3-[[3-[[5-[[2-(acetylamino)-2-deoxy-b eta-D-galactopyranosyl]oxy]-1-oxopentyl]amino]propyl]amino] -3-oxopropoxy]methyl]-1,12,19,25-tetraoxo-16-oxa-13,20,24-t riazanonacos-1-yl]-4-hydroxy-2-pyrrolidinyl)methyl ester
gtgacaacgtacccttcattt

SEQ ID NO: 642 - RNA, 21 nt, synthetic construct
  source 1..21: mol_type = other RNA
  modified_base 1: mod_base = OTHER; note = 2'-O-methyluridine-3'-phosphorothioate
  modified_base 2: mod_base = OTHER; note = 2'-O-methylguanosine-3'-phosphorothioate
  modified_base 3: mod_base = OTHER; note = 2'-O-methyladenosine-3'-phosphate
  modified_base 4: mod_base = OTHER; note = 2'-O-methylcytidine-3'-phosphate
  modified_base 5: mod_base = OTHER; note = 2'-O-methyladenosine-3'-phosphate
  modified_base 6: mod_base = OTHER; note = 2'-O-methyladenosine-3'-phosphate
  modified_base 7: mod_base = OTHER; note = 2'-deoxy-2'-fluorocytidine-3'-phosphate
  modified_base 8: mod_base = OTHER; note = 2'-O-methylguanosine-3'-phosphate
  modified_base 9: mod_base = OTHER; note = 2'-deoxy-2'-fluorouridine-3'-phosphate
  modified_base 10: mod_base = OTHER; note = 2'-deoxy-2'-fluoroadenosine-3'-phosphate
  modified_base 11: mod_base = OTHER; note = 2'-deoxy-2'-fluorocytidine-3'-phosphate
  modified_base 12: mod_base = OTHER; note = 2'-O-methylcytidine-3'-phosphate
  modified_base 13: mod_base = OTHER; note = 2'-O-methylcytidine-3'-phosphate
  modified_base 14: mod_base = OTHER; note = 2'-O-methyluridine-3'-phosphate
  modified_base 15: mod_base = OTHER; note = 2'-O-methyluridine-3'-phosphate
  modified_base 16: mod_base = OTHER; note = 2'-O-methylcytidine-3'-phosphate
  modified_base 17: mod_base = OTHER; note = 2'-O-methyladenosine-3'-phosphate
  modified_base 18: mod_base = OTHER; note = 2'-O-methyluridine-3'-phosphate
  modified_base 19: mod_base = OTHER; note = 2'-O-methyluridine-3'-phosphate
  modified_base 20: mod_base = OTHER; note = 2'-O-methylguanosine-3'-phosphate
  modified_base 21: mod_base = OTHER; note = 2'-O-methyluridine-3'-phosphate ((2S,4R)-1-[29-[[2-(acetylamino)-2-deoxy-beta-D-galactopyra nosyl]oxy]-14,14-bis[[3-[[3-[[5-[[2-(acetylamino)-2-deoxy-b eta-D-galactopyranosyl]oxy]-1-oxopentyl]amino]propyl]amino] -3-oxopropoxy]methyl]-1,12,19,25-tetraoxo-16-oxa-13,20,24-t riazanonacos-1-yl]-4-hydroxy-2-pyrrolidinyl)methyl ester
tgacaacgtacccttcattgt

SEQ ID NO: 643 - RNA, 21 nt, synthetic construct
  source 1..21: mol_type = other RNA
  modified_base 1: mod_base = OTHER; note = 2'-O-methylguanosine-3'-phosphorothioate
  modified_base 2: mod_base = OTHER; note = 2'-O-methyladenosine-3'-phosphorothioate
  modified_base 3: mod_base = OTHER; note = 2'-O-methylcytidine-3'-phosphate
  modified_base 4: mod_base = OTHER; note = 2'-O-methyladenosine-3'-phosphate
  modified_base 5: mod_base = OTHER; note = 2'-O-methyladenosine-3'-phosphate
  modified_base 6: mod_base = OTHER; note = 2'-O-methylcytidine-3'-phosphate
  modified_base 7: mod_base = OTHER; note = 2'-deoxy-2'-fluoroguanosine-3'-phosphate
  modified_base 8: mod_base = OTHER; note = 2'-O-methyluridine-3'-phosphate
  modified_base 9: mod_base = OTHER; note = 2'-deoxy-2'-fluoroadenosine-3'-phosphate
  modified_base 10: mod_base = OTHER; note = 2'-deoxy-2'-fluorocytidine-3'-phosphate
  modified_base 11: mod_base = OTHER; note = 2'-deoxy-2'-fluorocytidine-3'-phosphate
  modified_base 12: mod_base = OTHER; note = 2'-O-methylcytidine-3'-phosphate
  modified_base 13: mod_base = OTHER; note = 2'-O-methyluridine-3'-phosphate
  modified_base 14: mod_base = OTHER; note = 2'-O-methyluridine-3'-phosphate
  modified_base 15: mod_base = OTHER; note = 2'-O-methylcytidine-3'-phosphate
  modified_base 16: mod_base = OTHER; note = 2'-O-methyladenosine-3'-phosphate
  modified_base 17: mod_base = OTHER; note = 2'-O-methyluridine-3'-phosphate
  modified_base 18: mod_base = OTHER; note = 2'-O-methyluridine-3'-phosphate
  modified_base 19: mod_base = OTHER; note = 2'-O-methylguanosine-3'-phosphate
  modified_base 20: mod_base = OTHER; note = 2'-O-methyladenosine-3'-phosphate
  modified_base 21: mod_base = OTHER; note = 2'-O-methyluridine-3'-phosphate ((2S,4R)-1-[29-[[2-(acetylamino)-2-deoxy-beta-D-galactopyra nosyl]oxy]-14,14-bis[[3-[[3-[[5-[[2-(acetylamino)-2-deoxy-b eta-D-galactopyranosyl]oxy]-1-oxopentyl]amino]propyl]amino] -3-oxopropoxy]methyl]-1,12,19,25-tetraoxo-16-oxa-13,20,24-t riazanonacos-1-yl]-4-hydroxy-2-pyrrolidinyl)methyl ester
gacaacgtacccttcattgat

SEQ ID NO: 644 - RNA, 21 nt, synthetic construct
  source 1..21: mol_type = other RNA
  modified_base 1: mod_base = OTHER; note = 2'-O-methyladenosine-3'-phosphorothioate
  modified_base 2: mod_base = OTHER; note = 2'-O-methylcytidine-3'-phosphorothioate
  modified_base 3: mod_base = OTHER; note = 2'-O-methyladenosine-3'-phosphate
  modified_base 4: mod_base = OTHER; note = 2'-O-methyladenosine-3'-phosphate
  modified_base 5: mod_base = OTHER; note = 2'-O-methylcytidine-3'-phosphate
  modified_base 6: mod_base = OTHER; note = 2'-O-methylguanosine-3'-phosphate
  modified_base 7: mod_base = OTHER; note = 2'-deoxy-2'-fluorouridine-3'-phosphate
  modified_base 8: mod_base = OTHER; note = 2'-O-methyladenosine-3'-phosphate
  modified_base 9: mod_base = OTHER; note = 2'-deoxy-2'-fluorocytidine-3'-phosphate
  modified_base 10: mod_base = OTHER; note = 2'-deoxy-2'-fluorocytidine-3'-phosphate
  modified_base 11: mod_base = OTHER; note = 2'-deoxy-2'-fluorocytidine-3'-phosphate
  modified_base 12: mod_base = OTHER; note = 2'-O-methyluridine-3'-phosphate
  modified_base 13: mod_base = OTHER; note = 2'-O-methyluridine-3'-phosphate
  modified_base 14: mod_base = OTHER; note = 2'-O-methylcytidine-3'-phosphate
  modified_base 15: mod_base = OTHER; note = 2'-O-methyladenosine-3'-phosphate
  modified_base 16: mod_base = OTHER; note = 2'-O-methyluridine-3'-phosphate
  modified_base 17: mod_base = OTHER; note = 2'-O-methyluridine-3'-phosphate
  modified_base 18: mod_base = OTHER; note = 2'-O-methylguanosine-3'-phosphate
  modified_base 19: mod_base = OTHER; note = 2'-O-methyladenosine-3'-phosphate
  modified_base 20: mod_base = OTHER; note = 2'-O-methyluridine-3'-phosphate
  modified_base 21: mod_base = OTHER; note = 2'-O-methyluridine-3'-phosphate ((2S,4R)-1-[29-[[2-(acetylamino)-2-deoxy-beta-D-galactopyra nosyl]oxy]-14,14-bis[[3-[[3-[[5-[[2-(acetylamino)-2-deoxy-b eta-D-galactopyranosyl]oxy]-1-oxopentyl]amino]propyl]amino] -3-oxopropoxy]methyl]-1,12,19,25-tetraoxo-16-oxa-13,20,24-t riazanonacos-1-yl]-4-hydroxy-2-pyrrolidinyl)methyl ester
acaacgtacccttcattgatt

SEQ ID NO: 645 - RNA, 21 nt, synthetic construct
  source 1..21: mol_type = other RNA
  modified_base 1: mod_base = OTHER; note = 2'-O-methylcytidine-3'-phosphorothioate
  modified_base 2: mod_base = OTHER; note = 2'-O-methyladenosine-3'-phosphorothioate
  modified_base 3: mod_base = OTHER; note = 2'-O-methyladenosine-3'-phosphate
  modified_base 4: mod_base = OTHER; note = 2'-O-methylcytidine-3'-phosphate
  modified_base 5: mod_base = OTHER; note = 2'-O-methylguanosine-3'-phosphate
  modified_base 6: mod_base = OTHER; note = 2'-O-methyluridine-3'-phosphate
  modified_base 7: mod_base = OTHER; note = 2'-deoxy-2'-fluoroadenosine-3'-phosphate
  modified_base 8: mod_base = OTHER; note = 2'-O-methylcytidine-3'-phosphate
  modified_base 9: mod_base = OTHER; note = 2'-deoxy-2'-fluorocytidine-3'-phosphate
  modified_base 10: mod_base = OTHER; note = 2'-deoxy-2'-fluorocytidine-3'-phosphate
  modified_base 11: mod_base = OTHER; note = 2'-deoxy-2'-fluorouridine-3'-phosphate
  modified_base 12: mod_base = OTHER; note = 2'-O-methyluridine-3'-phosphate
  modified_base 13: mod_base = OTHER; note = 2'-O-methylcytidine-3'-phosphate
  modified_base 14: mod_base = OTHER; note = 2'-O-methyladenosine-3'-phosphate
  modified_base 15: mod_base = OTHER; note = 2'-O-methyluridine-3'-phosphate
  modified_base 16: mod_base = OTHER; note = 2'-O-methyluridine-3'-phosphate
  modified_base 17: mod_base = OTHER; note = 2'-O-methylguanosine-3'-phosphate
  modified_base 18: mod_base = OTHER; note = 2'-O-methyladenosine-3'-phosphate
  modified_base 19: mod_base = OTHER; note = 2'-O-methyluridine-3'-phosphate
  modified_base 20: mod_base = OTHER; note = 2'-O-methylguanosine-3'-phosphate
  modified_base 21: mod_base = OTHER; note = 2'-O-methyluridine-3'-phosphate ((2S,4R)-1-[29-[[2-(acetylamino)-2-deoxy-beta-D-galactopyra nosyl]oxy]-14,14-bis[[3-[[3-[[5-[[2-(acetylamino)-2-deoxy-b eta-D-galactopyranosyl]oxy]-1-oxopentyl]amino]propyl]amino] -3-oxopropoxy]methyl]-1,12,19,25-tetraoxo-16-oxa-13,20,24-t riazanonacos-1-yl]-4-hydroxy-2-pyrrolidinyl)methyl ester
caacgtacccttcattgatgt

SEQ ID NO: 646 - RNA, 21 nt, synthetic construct
  source 1..21: mol_type = other RNA
  modified_base 1: mod_base = OTHER; note = 2'-O-methyladenosine-3'-phosphorothioate
  modified_base 2: mod_base = OTHER; note = 2'-O-methyladenosine-3'-phosphorothioate
  modified_base 3: mod_base = OTHER; note = 2'-O-methylcytidine-3'-phosphate
  modified_base 4: mod_base = OTHER; note = 2'-O-methylguanosine-3'-phosphate
  modified_base 5: mod_base = OTHER; note = 2'-O-methyluridine-3'-phosphate
  modified_base 6: mod_base = OTHER; note = 2'-O-methyladenosine-3'-phosphate
  modified_base 7: mod_base = OTHER; note = 2'-deoxy-2'-fluorocytidine-3'-phosphate
  modified_base 8: mod_base = OTHER; note = 2'-O-methylcytidine-3'-phosphate
  modified_base 9: mod_base = OTHER; note = 2'-deoxy-2'-fluorocytidine-3'-phosphate
  modified_base 10: mod_base = OTHER; note = 2'-deoxy-2'-fluorouridine-3'-phosphate
  modified_base 11: mod_base = OTHER; note = 2'-deoxy-2'-fluorouridine-3'-phosphate
  modified_base 12: mod_base = OTHER; note = 2'-O-methylcytidine-3'-phosphate
  modified_base 13: mod_base = OTHER; note = 2'-O-methyladenosine-3'-phosphate
  modified_base 14: mod_base = OTHER; note = 2'-O-methyluridine-3'-phosphate
  modified_base 15: mod_base = OTHER; note = 2'-O-methyluridine-3'-phosphate
  modified_base 16: mod_base = OTHER; note = 2'-O-methylguanosine-3'-phosphate
  modified_base 17: mod_base = OTHER; note = 2'-O-methyladenosine-3'-phosphate
  modified_base 18: mod_base = OTHER; note = 2'-O-methyluridine-3'-phosphate
  modified_base 19: mod_base = OTHER; note = 2'-O-methylguanosine-3'-phosphate
  modified_base 20: mod_base = OTHER; note = 2'-O-methylcytidine-3'-phosphate
  modified_base 21: mod_base = OTHER; note = 2'-O-methyluridine-3'-phosphate ((2S,4R)-1-[29-[[2-(acetylamino)-2-deoxy-beta-D-galactopyra nosyl]oxy]-14,14-bis[[3-[[3-[[5-[[2-(acetylamino)-2-deoxy-b eta-D-galactopyranosyl]oxy]-1-oxopentyl]amino]propyl]amino] -3-oxopropoxy]methyl]-1,12,19,25-tetraoxo-16-oxa-13,20,24-t riazanonacos-1-yl]-4-hydroxy-2-pyrrolidinyl)methyl ester
aacgtacccttcattgatgct

SEQ ID NO: 647 - RNA, 21 nt, synthetic construct
  source 1..21: mol_type = other RNA
  modified_base 1: mod_base = OTHER; note = 2'-O-methylcytidine-3'-phosphorothioate
  modified_base 2: mod_base = OTHER; note = 2'-O-methylguanosine-3'-phosphorothioate
  modified_base 3: mod_base = OTHER; note = 2'-O-methyluridine-3'-phosphate
  modified_base 4: mod_base = OTHER; note = 2'-O-methyladenosine-3'-phosphate
  modified_base 5: mod_base = OTHER; note = 2'-O-methylcytidine-3'-phosphate
  modified_base 6: mod_base = OTHER; note = 2'-O-methylcytidine-3'-phosphate
  modified_base 7: mod_base = OTHER; note = 2'-deoxy-2'-fluorocytidine-3'-phosphate
  modified_base 8: mod_base = OTHER; note = 2'-O-methyluridine-3'-phosphate
  modified_base 9: mod_base = OTHER; note = 2'-deoxy-2'-fluorouridine-3'-phosphate
  modified_base 10: mod_base = OTHER; note = 2'-deoxy-2'-fluorocytidine-3'-phosphate
  modified_base 11: mod_base = OTHER; note = 2'-deoxy-2'-fluoroadenosine-3'-phosphate
  modified_base 12: mod_base = OTHER; note = 2'-O-methyluridine-3'-phosphate
  modified_base 13: mod_base = OTHER; note = 2'-O-methyluridine-3'-phosphate
  modified_base 14: mod_base = OTHER; note = 2'-O-methylguanosine-3'-phosphate
  modified_base 15: mod_base = OTHER; note = 2'-O-methyladenosine-3'-phosphate
  modified_base 16: mod_base = OTHER; note = 2'-O-methyluridine-3'-phosphate
  modified_base 17: mod_base = OTHER; note = 2'-O-methylguanosine-3'-phosphate
  modified_base 18: mod_base = OTHER; note = 2'-O-methylcytidine-3'-phosphate
  modified_base 19: mod_base = OTHER; note = 2'-O-methylcytidine-3'-phosphate
  modified_base 20: mod_base = OTHER; note = 2'-O-methyladenosine-3'-phosphate
  modified_base 21: mod_base = OTHER; note = 2'-O-methyluridine-3'-phosphate ((2S,4R)-1-[29-[[2-(acetylamino)-2-deoxy-beta-D-galactopyra nosyl]oxy]-14,14-bis[[3-[[3-[[5-[[2-(acetylamino)-2-deoxy-b eta-D-galactopyranosyl]oxy]-1-oxopentyl]amino]propyl]amino] -3-oxopropoxy]methyl]-1,12,19,25-tetraoxo-16-oxa-13,20,24-t riazanonacos-1-yl]-4-hydroxy-2-pyrrolidinyl)methyl ester
cgtacccttcattgatgccat

SEQ ID NO: 648 - RNA, 21 nt, synthetic construct
  source 1..21: mol_type = other RNA
  modified_base 1: mod_base = OTHER; note = 2'-O-methylguanosine-3'-phosphorothioate
  modified_base 2: mod_base = OTHER; note = 2'-O-methyluridine-3'-phosphorothioate
  modified_base 3: mod_base = OTHER; note = 2'-O-methyladenosine-3'-phosphate
  modified_base 4: mod_base = OTHER; note = 2'-O-methylcytidine-3'-phosphate
  modified_base 5: mod_base = OTHER; note = 2'-O-methylcytidine-3'-phosphate
  modified_base 6: mod_base = OTHER; note = 2'-O-methylcytidine-3'-phosphate
  modified_base 7: mod_base = OTHER; note = 2'-deoxy-2'-fluorouridine-3'-phosphate
  modified_base 8: mod_base = OTHER; note = 2'-O-methyluridine-3'-phosphate
  modified_base 9: mod_base = OTHER; note = 2'-deoxy-2'-fluorocytidine-3'-phosphate
  modified_base 10: mod_base = OTHER; note = 2'-deoxy-2'-fluoroadenosine-3'-phosphate
  modified_base 11: mod_base = OTHER; note = 2'-deoxy-2'-fluorouridine-3'-phosphate
  modified_base 12: mod_base = OTHER; note = 2'-O-methyluridine-3'-phosphate
  modified_base 13: mod_base = OTHER; note = 2'-O-methylguanosine-3'-phosphate
  modified_base 14: mod_base = OTHER; note = 2'-O-methyladenosine-3'-phosphate
  modified_base 15: mod_base = OTHER; note = 2'-O-methyluridine-3'-phosphate
  modified_base 16: mod_base = OTHER; note = 2'-O-methylguanosine-3'-phosphate
  modified_base 17: mod_base = OTHER; note = 2'-O-methylcytidine-3'-phosphate
  modified_base 18: mod_base = OTHER; note = 2'-O-methylcytidine-3'-phosphate
  modified_base 19: mod_base = OTHER; note = 2'-O-methyladenosine-3'-phosphate
  modified_base 20: mod_base = OTHER; note = 2'-O-methyladenosine-3'-phosphate
  modified_base 21: mod_base = OTHER; note = 2'-O-methyluridine-3'-phosphate ((2S,4R)-1-[29-[[2-(acetylamino)-2-deoxy-beta-D-galactopyra nosyl]oxy]-14,14-bis[[3-[[3-[[5-[[2-(acetylamino)-2-deoxy-b eta-D-galactopyranosyl]oxy]-1-oxopentyl]amino]propyl]amino] -3-oxopropoxy]methyl]-1,12,19,25-tetraoxo-16-oxa-13,20,24-t riazanonacos-1-yl]-4-hydroxy-2-pyrrolidinyl)methyl ester
gtacccttcattgatgccaat

SEQ ID NO: 649 - RNA, 21 nt, synthetic construct
  source 1..21: mol_type = other RNA
  modified_base 1: mod_base = OTHER; note = 2'-O-methyluridine-3'-phosphorothioate
  modified_base 2: mod_base = OTHER; note = 2'-O-methyladenosine-3'-phosphorothioate
  modified_base 3: mod_base = OTHER; note = 2'-O-methylcytidine-3'-phosphate
  modified_base 4: mod_base = OTHER; note = 2'-O-methylguanosine-3'-phosphate
  modified_base 5: mod_base = OTHER; note = 2'-O-methyladenosine-3'-phosphate
  modified_base 6: mod_base = OTHER; note = 2'-O-methylcytidine-3'-phosphate
  modified_base 7: mod_base = OTHER; note = 2'-deoxy-2'-fluoroadenosine-3'-phosphate
  modified_base 8: mod_base = OTHER; note = 2'-O-methyluridine-3'-phosphate
  modified_base 9: mod_base = OTHER; note = 2'-deoxy-2'-fluorocytidine-3'-phosphate
  modified_base 10: mod_base = OTHER; note = 2'-deoxy-2'-fluorouridine-3'-phosphate
  modified_base 11: mod_base = OTHER; note = 2'-deoxy-2'-fluoroguanosine-3'-phosphate
  modified_base 12: mod_base = OTHER; note = 2'-O-methylcytidine-3'-phosphate
  modified_base 13: mod_base = OTHER; note = 2'-O-methylcytidine-3'-phosphate
  modified_base 14: mod_base = OTHER; note = 2'-O-methylcytidine-3'-phosphate
  modified_base 15: mod_base = OTHER; note = 2'-O-methyluridine-3'-phosphate
  modified_base 16: mod_base = OTHER; note = 2'-O-methyladenosine-3'-phosphate
  modified_base 17: mod_base = OTHER; note = 2'-O-methyladenosine-3'-phosphate
  modified_base 18: mod_base = OTHER; note = 2'-O-methyladenosine-3'-phosphate
  modified_base 19: mod_base = OTHER; note = 2'-O-methylguanosine-3'-phosphate
  modified_base 20: mod_base = OTHER; note = 2'-O-methyluridine-3'-phosphate
  modified_base 21: mod_base = OTHER; note = 2'-O-methyluridine-3'-phosphate ((2S,4R)-1-[29-[[2-(acetylamino)-2-deoxy-beta-D-galactopyra nosyl]oxy]-14,14-bis[[3-[[3-[[5-[[2-(acetylamino)-2-deoxy-b eta-D-galactopyranosyl]oxy]-1-oxopentyl]amino]propyl]amino] -3-oxopropoxy]methyl]-1,12,19,25-tetraoxo-16-oxa-13,20,24-t riazanonacos-1-yl]-4-hydroxy-2-pyrrolidinyl)methyl ester
tacgacatctgccctaaagtt

SEQ ID NO: 650 - RNA, 21 nt, synthetic construct
  source 1..21: mol_type = other RNA
  modified_base 1: mod_base = OTHER; note = 2'-O-methylcytidine-3'-phosphorothioate
  modified_base 2: mod_base = OTHER; note = 2'-O-methylguanosine-3'-phosphorothioate
  modified_base 3: mod_base = OTHER; note = 2'-O-methyladenosine-3'-phosphate
  modified_base 4: mod_base = OTHER; note = 2'-O-methylcytidine-3'-phosphate
  modified_base 5: mod_base = OTHER; note = 2'-O-methyladenosine-3'-phosphate
  modified_base 6: mod_base = OTHER; note = 2'-O-methyluridine-3'-phosphate
  modified_base 7: mod_base = OTHER; note = 2'-deoxy-2'-fluorocytidine-3'-phosphate
  modified_base 8: mod_base = OTHER; note = 2'-O-methyluridine-3'-phosphate
  modified_base 9: mod_base = OTHER; note = 2'-deoxy-2'-fluoroguanosine-3'-phosphate
  modified_base 10: mod_base = OTHER; note = 2'-deoxy-2'-fluorocytidine-3'-phosphate
  modified_base 11: mod_base = OTHER; note = 2'-deoxy-2'-fluorocytidine-3'-phosphate
  modified_base 12: mod_base = OTHER; note = 2'-O-methylcytidine-3'-phosphate
  modified_base 13: mod_base = OTHER; note = 2'-O-methyluridine-3'-phosphate
  modified_base 14: mod_base = OTHER; note = 2'-O-methyladenosine-3'-phosphate
  modified_base 15: mod_base = OTHER; note = 2'-O-methyladenosine-3'-phosphate
  modified_base 16: mod_base = OTHER; note = 2'-O-methyladenosine-3'-phosphate
  modified_base 17: mod_base = OTHER; note = 2'-O-methylguanosine-3'-phosphate
  modified_base 18: mod_base = OTHER; note = 2'-O-methyluridine-3'-phosphate
  modified_base 19: mod_base = OTHER; note = 2'-O-methylcytidine-3'-phosphate
  modified_base 20: mod_base = OTHER; note = 2'-O-methyladenosine-3'-phosphate
  modified_base 21: mod_base = OTHER; note = 2'-O-methyluridine-3'-phosphate ((2S,4R)-1-[29-[[2-(acetylamino)-2-deoxy-beta-D-galactopyra nosyl]oxy]-14,14-bis[[3-[[3-[[5-[[2-(acetylamino)-2-deoxy-b eta-D-galactopyranosyl]oxy]-1-oxopentyl]amino]propyl]amino] -3-oxopropoxy]methyl]-1,12,19,25-tetraoxo-16-oxa-13,20,24-t riazanonacos-1-yl]-4-hydroxy-2-pyrrolidinyl)methyl ester
cgacatctgccctaaagtcat

SEQ ID NO: 651 - RNA, 21 nt, synthetic construct
  source 1..21: mol_type = other RNA
  modified_base 1: mod_base = OTHER; note = 2'-O-methylguanosine-3'-phosphorothioate
  modified_base 2: mod_base = OTHER; note = 2'-O-methyladenosine-3'-phosphorothioate
  modified_base 3: mod_base = OTHER; note = 2'-O-methylcytidine-3'-phosphate
  modified_base 4: mod_base = OTHER; note = 2'-O-methyladenosine-3'-phosphate
  modified_base 5: mod_base = OTHER; note = 2'-O-methyluridine-3'-phosphate
  modified_base 6: mod_base = OTHER; note = 2'-O-methylcytidine-3'-phosphate
  modified_base 7: mod_base = OTHER; note = 2'-deoxy-2'-fluorouridine-3'-phosphate
  modified_base 8: mod_base = OTHER; note = 2'-O-methylguanosine-3'-phosphate
  modified_base 9: mod_base = OTHER; note = 2'-deoxy-2'-fluorocytidine-3'-phosphate
  modified_base 10: mod_base = OTHER; note = 2'-deoxy-2'-fluorocytidine-3'-phosphate
  modified_base 11: mod_base = OTHER; note = 2'-deoxy-2'-fluorocytidine-3'-phosphate
  modified_base 12: mod_base = OTHER; note = 2'-O-methyluridine-3'-phosphate
  modified_base 13: mod_base = OTHER; note = 2'-O-methyladenosine-3'-phosphate
  modified_base 14: mod_base = OTHER; note = 2'-O-methyladenosine-3'-phosphate
  modified_base 15: mod_base = OTHER; note = 2'-O-methyladenosine-3'-phosphate
  modified_base 16: mod_base = OTHER; note = 2'-O-methylguanosine-3'-phosphate
  modified_base 17: mod_base = OTHER; note = 2'-O-methyluridine-3'-phosphate
  modified_base 18: mod_base = OTHER; note = 2'-O-methylcytidine-3'-phosphate
  modified_base 19: mod_base = OTHER; note = 2'-O-methyladenosine-3'-phosphate
  modified_base 20: mod_base = OTHER; note = 2'-O-methyladenosine-3'-phosphate
  modified_base 21: mod_base = OTHER; note = 2'-O-methyluridine-3'-phosphate ((2S,4R)-1-[29-[[2-(acetylamino)-2-deoxy-beta-D-galactopyra nosyl]oxy]-14,14-bis[[3-[[3-[[5-[[2-(acetylamino)-2-deoxy-b eta-D-galactopyranosyl]oxy]-1-oxopentyl]amino]propyl]amino] -3-oxopropoxy]methyl]-1,12,19,25-tetraoxo-16-oxa-13,20,24-t riazanonacos-1-yl]-4-hydroxy-2-pyrrolidinyl)methyl ester
gacatctgccctaaagtcaat

SEQ ID NO: 652 - RNA, 21 nt, synthetic construct
  source 1..21: mol_type = other RNA
  modified_base 1: mod_base = OTHER; note = 2'-O-methyladenosine-3'-phosphorothioate
  modified_base 2: mod_base = OTHER; note = 2'-O-methylcytidine-3'-phosphorothioate
  modified_base 3: mod_base = OTHER; note = 2'-O-methyladenosine-3'-phosphate
  modified_base 4: mod_base = OTHER; note = 2'-O-methyluridine-3'-phosphate
  modified_base 5: mod_base = OTHER; note = 2'-O-methylcytidine-3'-phosphate
  modified_base 6: mod_base = OTHER; note = 2'-O-methyluridine-3'-phosphate
  modified_base 7: mod_base = OTHER; note = 2'-deoxy-2'-fluoroguanosine-3'-phosphate
  modified_base 8: mod_base = OTHER; note = 2'-O-methylcytidine-3'-phosphate
  modified_base 9: mod_base = OTHER; note = 2'-deoxy-2'-fluorocytidine-3'-phosphate
  modified_base 10: mod_base = OTHER; note = 2'-deoxy-2'-fluorocytidine-3'-phosphate
  modified_base 11: mod_base = OTHER; note = 2'-deoxy-2'-fluorouridine-3'-phosphate
  modified_base 12: mod_base = OTHER; note = 2'-O-methyladenosine-3'-phosphate
  modified_base 13: mod_base = OTHER; note = 2'-O-methyladenosine-3'-phosphate
  modified_base 14: mod_base = OTHER; note = 2'-O-methyladenosine-3'-phosphate
  modified_base 15: mod_base = OTHER; note = 2'-O-methylguanosine-3'-phosphate
  modified_base 16: mod_base = OTHER; note = 2'-O-methyluridine-3'-phosphate
  modified_base 17: mod_base = OTHER; note = 2'-O-methylcytidine-3'-phosphate
  modified_base 18: mod_base = OTHER; note = 2'-O-methyladenosine-3'-phosphate
  modified_base 19: mod_base = OTHER; note = 2'-O-methyladenosine-3'-phosphate
  modified_base 20: mod_base = OTHER; note = 2'-O-methylguanosine-3'-phosphate
  modified_base 21: mod_base = OTHER; note = 2'-O-methyluridine-3'-phosphate ((2S,4R)-1-[29-[[2-(acetylamino)-2-deoxy-beta-D-galactopyra nosyl]oxy]-14,14-bis[[3-[[3-[[5-[[2-(acetylamino)-2-deoxy-b eta-D-galactopyranosyl]oxy]-1-oxopentyl]amino]propyl]amino] -3-oxopropoxy]methyl]-1,12,19,25-tetraoxo-16-oxa-13,20,24-t riazanonacos-1-yl]-4-hydroxy-2-pyrrolidinyl)methyl ester
acatctgccctaaagtcaagt

SEQ ID NO: 653 - RNA, 21 nt, synthetic construct
  source 1..21: mol_type = other RNA
  modified_base 1: mod_base = OTHER; note = 2'-O-methyluridine-3'-phosphorothioate
  modified_base 2: mod_base = OTHER; note = 2'-O-methylcytidine-3'-phosphorothioate
  modified_base 3: mod_base = OTHER; note = 2'-O-methyluridine-3'-phosphate
  modified_base 4: mod_base = OTHER; note = 2'-O-methylguanosine-3'-phosphate
  modified_base 5: mod_base = OTHER; note = 2'-O-methylcytidine-3'-phosphate
  modified_base 6: mod_base = OTHER; note = 2'-O-methylcytidine-3'-phosphate
  modified_base 7: mod_base = OTHER; note = 2'-deoxy-2'-fluorocytidine-3'-phosphate
  modified_base 8: mod_base = OTHER; note = 2'-O-methyluridine-3'-phosphate
  modified_base 9: mod_base = OTHER; note = 2'-deoxy-2'-fluoroadenosine-3'-phosphate
  modified_base 10: mod_base = OTHER; note = 2'-deoxy-2'-fluoroadenosine-3'-phosphate
  modified_base 11: mod_base = OTHER; note = 2'-deoxy-2'-fluoroadenosine-3'-phosphate
  modified_base 12: mod_base = OTHER; note = 2'-O-methylguanosine-3'-phosphate
  modified_base 13: mod_base = OTHER; note = 2'-O-methyluridine-3'-phosphate
  modified_base 14: mod_base = OTHER; note = 2'-O-methylcytidine-3'-phosphate
  modified_base 15: mod_base = OTHER; note = 2'-O-methyladenosine-3'-phosphate
  modified_base 16: mod_base = OTHER; note = 2'-O-methyladenosine-3'-phosphate
  modified_base 17: mod_base = OTHER; note = 2'-O-methylguanosine-3'-phosphate
  modified_base 18: mod_base = OTHER; note = 2'-O-methyluridine-3'-phosphate
  modified_base 19: mod_base = OTHER; note = 2'-O-methylcytidine-3'-phosphate
  modified_base 20: mod_base = OTHER; note = 2'-O-methylcytidine-3'-phosphate
  modified_base 21: mod_base = OTHER; note = 2'-O-methyluridine-3'-phosphate ((2S,4R)-1-[29-[[2-(acetylamino)-2-deoxy-beta-D-galactopyra nosyl]oxy]-14,14-bis[[3-[[3-[[5-[[2-(acetylamino)-2-deoxy-b eta-D-galactopyranosyl]oxy]-1-oxopentyl]amino]propyl]amino] -3-oxopropoxy]methyl]-1,12,19,25-tetraoxo-16-oxa-13,20,24-t riazanonacos-1-yl]-4-hydroxy-2-pyrrolidinyl)methyl ester
tctgccctaaagtcaagtcct

SEQ ID NO: 654 - RNA, 21 nt, synthetic construct
  source 1..21: mol_type = other RNA
  modified_base 1: mod_base = OTHER; note = 2'-O-methylcytidine-3'-phosphorothioate
  modified_base 2: mod_base = OTHER; note = 2'-O-methyluridine-3'-phosphorothioate
  modified_base 3: mod_base = OTHER; note = 2'-O-methylguanosine-3'-phosphate
  modified_base 4: mod_base = OTHER; note = 2'-O-methylcytidine-3'-phosphate
  modified_base 5: mod_base = OTHER; note = 2'-O-methylcytidine-3'-phosphate
  modified_base 6: mod_base = OTHER; note = 2'-O-methylcytidine-3'-phosphate
  modified_base 7: mod_base = OTHER; note = 2'-deoxy-2'-fluorouridine-3'-phosphate
  modified_base 8: mod_base = OTHER; note = 2'-O-methyladenosine-3'-phosphate
  modified_base 9: mod_base = OTHER; note = 2'-deoxy-2'-fluoroadenosine-3'-phosphate
  modified_base 10: mod_base = OTHER; note = 2'-deoxy-2'-fluoroadenosine-3'-phosphate
  modified_base 11: mod_base = OTHER; note = 2'-deoxy-2'-fluoroguanosine-3'-phosphate
  modified_base 12: mod_base = OTHER; note = 2'-O-methyluridine-3'-phosphate
  modified_base 13: mod_base = OTHER; note = 2'-O-methylcytidine-3'-phosphate
  modified_base 14: mod_base = OTHER; note = 2'-O-methyladenosine-3'-phosphate
  modified_base 15: mod_base = OTHER; note = 2'-O-methyladenosine-3'-phosphate
  modified_base 16: mod_base = OTHER; note = 2'-O-methylguanosine-3'-phosphate
  modified_base 17: mod_base = OTHER; note = 2'-O-methyluridine-3'-phosphate
  modified_base 18: mod_base = OTHER; note = 2'-O-methylcytidine-3'-phosphate
  modified_base 19: mod_base = OTHER; note = 2'-O-methylcytidine-3'-phosphate
  modified_base 20: mod_base = OTHER; note = 2'-O-methyladenosine-3'-phosphate
  modified_base 21: mod_base = OTHER; note = 2'-O-methyluridine-3'-phosphate ((2S,4R)-1-[29-[[2-(acetylamino)-2-deoxy-beta-D-galactopyra nosyl]oxy]-14,14-bis[[3-[[3-[[5-[[2-(acetylamino)-2-deoxy-b eta-D-galactopyranosyl]oxy]-1-oxopentyl]amino]propyl]amino] -3-oxopropoxy]methyl]-1,12,19,25-tetraoxo-16-oxa-13,20,24-t riazanonacos-1-yl]-4-hydroxy-2-pyrrolidinyl)methyl ester
ctgccctaaagtcaagtccat

SEQ ID NO: 655 - RNA, 21 nt, synthetic construct
  source 1..21: mol_type = other RNA
  modified_base 1: mod_base = OTHER; note = 2'-O-methyladenosine-3'-phosphorothioate
  modified_base 2: mod_base = OTHER; note = 2'-O-methyluridine-3'-phosphorothioate
  modified_base 3: mod_base = OTHER; note = 2'-O-methylguanosine-3'-phosphate
  modified_base 4: mod_base = OTHER; note = 2'-O-methyluridine-3'-phosphate
  modified_base 5: mod_base = OTHER; note = 2'-O-methylguanosine-3'-phosphate
  modified_base 6: mod_base = OTHER; note = 2'-O-methylguanosine-3'-phosphate
  modified_base 7: mod_base = OTHER; note = 2'-deoxy-2'-fluoroadenosine-3'-phosphate
  modified_base 8: mod_base = OTHER; note = 2'-O-methylcytidine-3'-phosphate
  modified_base 9: mod_base = OTHER; note = 2'-deoxy-2'-fluoroadenosine-3'-phosphate
  modified_base 10: mod_base = OTHER; note = 2'-deoxy-2'-fluorouridine-3'-phosphate
  modified_base 11: mod_base = OTHER; note = 2'-deoxy-2'-fluorocytidine-3'-phosphate
  modified_base 12: mod_base = OTHER; note = 2'-O-methyladenosine-3'-phosphate
  modified_base 13: mod_base = OTHER; note = 2'-O-methylcytidine-3'-phosphate
  modified_base 14: mod_base = OTHER; note = 2'-O-methylcytidine-3'-phosphate
  modified_base 15: mod_base = OTHER; note = 2'-O-methyladenosine-3'-phosphate
  modified_base 16: mod_base = OTHER; note = 2'-O-methyladenosine-3'-phosphate
  modified_base 17: mod_base = OTHER; note = 2'-O-methylguanosine-3'-phosphate
  modified_base 18: mod_base = OTHER; note = 2'-O-methylcytidine-3'-phosphate
  modified_base 19: mod_base = OTHER; note = 2'-O-methyluridine-3'-phosphate
  modified_base 20: mod_base = OTHER; note = 2'-O-methylcytidine-3'-phosphate
  modified_base 21: mod_base = OTHER; note = 2'-O-methyluridine-3'-phosphate ((2S,4R)-1-[29-[[2-(acetylamino)-2-deoxy-beta-D-galactopyra nosyl]oxy]-14,14-bis[[3-[[3-[[5-[[2-(acetylamino)-2-deoxy-b eta-D-galactopyranosyl]oxy]-1-oxopentyl]amino]propyl]amino] -3-oxopropoxy]methyl]-1,12,19,25-tetraoxo-16-oxa-13,20,24-t riazanonacos-1-yl]-4-hydroxy-2-pyrrolidinyl)methyl ester
atgtggacatcaccaagctct

SEQ ID NO: 656 - RNA, 21 nt, synthetic construct
  source 1..21: mol_type = other RNA
  modified_base 1: mod_base = OTHER; note = 2'-O-methyluridine-3'-phosphorothioate
  modified_base 2: mod_base = OTHER; note = 2'-O-methylguanosine-3'-phosphorothioate
  modified_base 3: mod_base = OTHER; note = 2'-O-methyluridine-3'-phosphate
  modified_base 4: mod_base = OTHER; note = 2'-O-methylguanosine-3'-phosphate
  modified_base 5: mod_base = OTHER; note = 2'-O-methylguanosine-3'-phosphate
  modified_base 6: mod_base = OTHER; note = 2'-O-methyladenosine-3'-phosphate
  modified_base 7: mod_base = OTHER; note = 2'-deoxy-2'-fluorocytidine-3'-phosphate
  modified_base 8: mod_base = OTHER; note = 2'-O-methyladenosine-3'-phosphate
  modified_base 9: mod_base = OTHER; note = 2'-deoxy-2'-fluorouridine-3'-phosphate
  modified_base 10: mod_base = OTHER; note = 2'-deoxy-2'-fluorocytidine-3'-phosphate
  modified_base 11: mod_base = OTHER; note = 2'-deoxy-2'-fluoroadenosine-3'-phosphate
  modified_base 12: mod_base = OTHER; note = 2'-O-methylcytidine-3'-phosphate
  modified_base 13: mod_base = OTHER; note = 2'-O-methylcytidine-3'-phosphate
  modified_base 14: mod_base = OTHER; note = 2'-O-methyladenosine-3'-phosphate
  modified_base 15: mod_base = OTHER; note = 2'-O-methyladenosine-3'-phosphate
  modified_base 16: mod_base = OTHER; note = 2'-O-methylguanosine-3'-phosphate
  modified_base 17: mod_base = OTHER; note = 2'-O-methylcytidine-3'-phosphate
  modified_base 18: mod_base = OTHER; note = 2'-O-methyluridine-3'-phosphate
  modified_base 19: mod_base = OTHER; note = 2'-O-methylcytidine-3'-phosphate
  modified_base 20: mod_base = OTHER; note = 2'-O-methyladenosine-3'-phosphate
  modified_base 21: mod_base = OTHER; note = 2'-O-methyluridine-3'-phosphate ((2S,4R)-1-[29-[[2-(acetylamino)-2-deoxy-beta-D-galactopyra nosyl]oxy]-14,14-bis[[3-[[3-[[5-[[2-(acetylamino)-2-deoxy-b eta-D-galactopyranosyl]oxy]-1-oxopentyl]amino]propyl]amino] -3-oxopropoxy]methyl]-1,12,19,25-tetraoxo-16-oxa-13,20,24-t riazanonacos-1-yl]-4-hydroxy-2-pyrrolidinyl)methyl ester
tgtggacatcaccaagctcat

SEQ ID NO: 657 - RNA, 21 nt, synthetic construct
  source 1..21: mol_type = other RNA
  modified_base 1: mod_base = OTHER; note = 2'-O-methylguanosine-3'-phosphorothioate
  modified_base 2: mod_base = OTHER; note = 2'-O-methyluridine-3'-phosphorothioate
  modified_base 3: mod_base = OTHER; note = 2'-O-methylcytidine-3'-phosphate
  modified_base 4: mod_base = OTHER; note = 2'-O-methyluridine-3'-phosphate
  modified_base 5: mod_base = OTHER; note = 2'-O-methyladenosine-3'-phosphate
  modified_base 6: mod_base = OTHER; note = 2'-O-methylcytidine-3'-phosphate
  modified_base 7: mod_base = OTHER; note = 2'-deoxy-2'-fluoroguanosine-3'-phosphate
  modified_base 8: mod_base = OTHER; note = 2'-O-methylcytidine-3'-phosphate
  modified_base 9: mod_base = OTHER; note = 2'-deoxy-2'-fluorocytidine-3'-phosphate
  modified_base 10: mod_base = OTHER; note = 2'-deoxy-2'-fluorouridine-3'-phosphate
  modified_base 11: mod_base = OTHER; note = 2'-deoxy-2'-fluorocytidine-3'-phosphate
  modified_base 12: mod_base = OTHER; note = 2'-O-methyluridine-3'-phosphate
  modified_base 13: mod_base = OTHER; note = 2'-O-methylguanosine-3'-phosphate
  modified_base 14: mod_base = OTHER; note = 2'-O-methylcytidine-3'-phosphate
  modified_base 15: mod_base = OTHER; note = 2'-O-methyladenosine-3'-phosphate
  modified_base 16: mod_base = OTHER; note = 2'-O-methylcytidine-3'-phosphate
  modified_base 17: mod_base = OTHER; note = 2'-O-methyladenosine-3'-phosphate
  modified_base 18: mod_base = OTHER; note = 2'-O-methylguanosine-3'-phosphate
  modified_base 19: mod_base = OTHER; note = 2'-O-methylguanosine-3'-phosphate
  modified_base 20: mod_base = OTHER; note = 2'-O-methylguanosine-3'-phosphate
  modified_base 21: mod_base = OTHER; note = 2'-O-methyluridine-3'-phosphate ((2S,4R)-1-[29-[[2-(acetylamino)-2-deoxy-beta-D-galactopyra nosyl]oxy]-14,14-bis[[3-[[3-[[5-[[2-(acetylamino)-2-deoxy-b eta-D-galactopyranosyl]oxy]-1-oxopentyl]amino]propyl]amino] -3-oxopropoxy]methyl]-1,12,19,25-tetraoxo-16-oxa-13,20,24-t riazanonacos-1-yl]-4-hydroxy-2-pyrrolidinyl)methyl ester
gtctacgcctctgcacagggt

SEQ ID NO: 658 - RNA, 21 nt, synthetic construct
  source 1..21: mol_type = other RNA
  modified_base 1: mod_base = OTHER; note = 2'-O-methylcytidine-3'-phosphorothioate
  modified_base 2: mod_base = OTHER; note = 2'-O-methylcytidine-3'-phosphorothioate
  modified_base 3: mod_base = OTHER; note = 2'-O-methyluridine-3'-phosphate
  modified_base 4: mod_base = OTHER; note = 2'-O-methylcytidine-3'-phosphate
  modified_base 5: mod_base = OTHER; note = 2'-O-methyluridine-3'-phosphate
  modified_base 6: mod_base = OTHER; note = 2'-O-methylguanosine-3'-phosphate
  modified_base 7: mod_base = OTHER; note = 2'-deoxy-2'-fluorocytidine-3'-phosphate
  modified_base 8: mod_base = OTHER; note = 2'-O-methyladenosine-3'-phosphate
  modified_base 9: mod_base = OTHER; note = 2'-deoxy-2'-fluorocytidine-3'-phosphate
  modified_base 10: mod_base = OTHER; note = 2'-deoxy-2'-fluoroadenosine-3'-phosphate
  modified_base 11: mod_base = OTHER; note = 2'-deoxy-2'-fluoroguanosine-3'-phosphate
  modified_base 12: mod_base = OTHER; note = 2'-O-methylguanosine-3'-phosphate
  modified_base 13: mod_base = OTHER; note = 2'-O-methylguanosine-3'-phosphate
  modified_base 14: mod_base = OTHER; note = 2'-O-methyladenosine-3'-phosphate
  modified_base 15: mod_base = OTHER; note = 2'-O-methyladenosine-3'-phosphate
  modified_base 16: mod_base = OTHER; note = 2'-O-methylcytidine-3'-phosphate
  modified_base 17: mod_base = OTHER; note = 2'-O-methylcytidine-3'-phosphate
  modified_base 18: mod_base = OTHER; note = 2'-O-methyluridine-3'-phosphate
  modified_base 19: mod_base = OTHER; note = 2'-O-methylcytidine-3'-phosphate
  modified_base 20: mod_base = OTHER; note = 2'-O-methyluridine-3'-phosphate
  modified_base 21: mod_base = OTHER; note = 2'-O-methyluridine-3'-phosphate ((2S,4R)-1-[29-[[2-(acetylamino)-2-deoxy-beta-D-galactopyra nosyl]oxy]-14,14-bis[[3-[[3-[[5-[[2-(acetylamino)-2-deoxy-b eta-D-galactopyranosyl]oxy]-1-oxopentyl]amino]propyl]amino] -3-oxopropoxy]methyl]-1,12,19,25-tetraoxo-16-oxa-13,20,24-t riazanonacos-1-yl]-4-hydroxy-2-pyrrolidinyl)methyl ester
cctctgcacagggaacctctt

SEQ ID NO: 659 - RNA, 21 nt, synthetic construct
  source 1..21: mol_type = other RNA
  modified_base 1: mod_base = OTHER; note = 2'-O-methyluridine-3'-phosphorothioate
  modified_base 2: mod_base = OTHER; note = 2'-O-methylguanosine-3'-phosphorothioate
  modified_base 3: mod_base = OTHER; note = 2'-O-methylcytidine-3'-phosphate
  modified_base 4: mod_base = OTHER; note = 2'-O-methyladenosine-3'-phosphate
  modified_base 5: mod_base = OTHER; note = 2'-O-methylcytidine-3'-phosphate
  modified_base 6: mod_base = OTHER; note = 2'-O-methyladenosine-3'-phosphate
  modified_base 7: mod_base = OTHER; note = 2'-deoxy-2'-fluoroguanosine-3'-phosphate
  modified_base 8: mod_base = OTHER; note = 2'-O-methylguanosine-3'-phosphate
  modified_base 9: mod_base = OTHER; note = 2'-deoxy-2'-fluoroguanosine-3'-phosphate
  modified_base 10: mod_base = OTHER; note = 2'-deoxy-2'-fluoroadenosine-3'-phosphate
  modified_base 11: mod_base = OTHER; note = 2'-deoxy-2'-fluoroadenosine-3'-phosphate
  modified_base 12: mod_base = OTHER; note = 2'-O-methylcytidine-3'-phosphate
  modified_base 13: mod_base = OTHER; note = 2'-O-methylcytidine-3'-phosphate
  modified_base 14: mod_base = OTHER; note = 2'-O-methyluridine-3'-phosphate
  modified_base 15: mod_base = OTHER; note = 2'-O-methylcytidine-3'-phosphate
  modified_base 16: mod_base = OTHER; note = 2'-O-methyluridine-3'-phosphate
  modified_base 17: mod_base = OTHER; note = 2'-O-methyladenosine-3'-phosphate
  modified_base 18: mod_base = OTHER; note = 2'-O-methylcytidine-3'-phosphate
  modified_base 19: mod_base = OTHER; note = 2'-O-methylcytidine-3'-phosphate
  modified_base 20: mod_base = OTHER; note = 2'-O-methyluridine-3'-phosphate
  modified_base 21: mod_base = OTHER; note = 2'-O-methyluridine-3'-phosphate ((2S,4R)-1-[29-[[2-(acetylamino)-2-deoxy-beta-D-galactopyra nosyl]oxy]-14,14-bis[[3-[[3-[[5-[[2-(acetylamino)-2-deoxy-b eta-D-galactopyranosyl]oxy]-1-oxopentyl]amino]propyl]amino] -3-oxopropoxy]methyl]-1,12,19,25-tetraoxo-16-oxa-13,20,24-t riazanonacos-1-yl]-4-hydroxy-2-pyrrolidinyl)methyl ester
tgcacagggaacctctacctt

SEQ ID NO: 660 - RNA, 21 nt, synthetic construct
  source 1..21: mol_type = other RNA
  modified_base 1: mod_base = OTHER; note = 2'-O-methylguanosine-3'-phosphorothioate
  modified_base 2: mod_base = OTHER; note = 2'-O-methylcytidine-3'-phosphorothioate
  modified_base 3: mod_base = OTHER; note = 2'-O-methyladenosine-3'-phosphate
  modified_base 4: mod_base = OTHER; note = 2'-O-methylcytidine-3'-phosphate
  modified_base 5: mod_base = OTHER; note = 2'-O-methyladenosine-3'-phosphate
  modified_base 6: mod_base = OTHER; note = 2'-O-methylguanosine-3'-phosphate
  modified_base 7: mod_base = OTHER; note = 2'-deoxy-2'-fluoroguanosine-3'-phosphate
  modified_base 8: mod_base = OTHER; note = 2'-O-methylguanosine-3'-phosphate
  modified_base 9: mod_base = OTHER; note = 2'-deoxy-2'-fluoroadenosine-3'-phosphate
  modified_base 10: mod_base = OTHER; note = 2'-deoxy-2'-fluoroadenosine-3'-phosphate
  modified_base 11: mod_base = OTHER; note = 2'-deoxy-2'-fluorocytidine-3'-phosphate
  modified_base 12: mod_base = OTHER; note = 2'-O-methylcytidine-3'-phosphate
  modified_base 13: mod_base = OTHER; note = 2'-O-methyluridine-3'-phosphate
  modified_base 14: mod_base = OTHER; note = 2'-O-methylcytidine-3'-phosphate
  modified_base 15: mod_base = OTHER; note = 2'-O-methyluridine-3'-phosphate
  modified_base 16: mod_base = OTHER; note = 2'-O-methyladenosine-3'-phosphate
  modified_base 17: mod_base = OTHER; note = 2'-O-methylcytidine-3'-phosphate
  modified_base 18: mod_base = OTHER; note = 2'-O-methylcytidine-3'-phosphate
  modified_base 19: mod_base = OTHER; note = 2'-O-methyluridine-3'-phosphate
  modified_base 20: mod_base = OTHER; note = 2'-O-methyluridine-3'-phosphate
  modified_base 21: mod_base = OTHER; note = 2'-O-methyluridine-3'-phosphate ((2S,4R)-1-[29-[[2-(acetylamino)-2-deoxy-beta-D-galactopyra nosyl]oxy]-14,14-bis[[3-[[3-[[5-[[2-(acetylamino)-2-deoxy-b eta-D-galactopyranosyl]oxy]-1-oxopentyl]amino]propyl]amino] -3-oxopropoxy]methyl]-1,12,19,25-tetraoxo-16-oxa-13,20,24-t riazanonacos-1-yl]-4-hydroxy-2-pyrrolidinyl)methyl ester
gcacagggaacctctaccttt

SEQ ID NO: 661 - RNA, 21 nt, synthetic construct
  source 1..21: mol_type = other RNA
  modified_base 1: mod_base = OTHER; note = 2'-O-methylcytidine-3'-phosphorothioate
  modified_base 2: mod_base = OTHER; note = 2'-O-methyladenosine-3'-phosphorothioate
  modified_base 3: mod_base = OTHER; note = 2'-O-methylcytidine-3'-phosphate
  modified_base 4: mod_base = OTHER; note = 2'-O-methyladenosine-3'-phosphate
  modified_base 5: mod_base = OTHER; note = 2'-O-methylguanosine-3'-phosphate
  modified_base 6: mod_base = OTHER; note = 2'-O-methylguanosine-3'-phosphate
  modified_base 7: mod_base = OTHER; note = 2'-deoxy-2'-fluoroguanosine-3'-phosphate
  modified_base 8: mod_base = OTHER; note = 2'-O-methyladenosine-3'-phosphate
  modified_base 9: mod_base = OTHER; note = 2'-deoxy-2'-fluoroadenosine-3'-phosphate
  modified_base 10: mod_base = OTHER; note = 2'-deoxy-2'-fluorocytidine-3'-phosphate
  modified_base 11: mod_base = OTHER; note = 2'-deoxy-2'-fluorocytidine-3'-phosphate
  modified_base 12: mod_base = OTHER; note = 2'-O-methyluridine-3'-phosphate
  modified_base 13: mod_base = OTHER; note = 2'-O-methylcytidine-3'-phosphate
  modified_base 14: mod_base = OTHER; note = 2'-O-methyluridine-3'-phosphate
  modified_base 15: mod_base = OTHER; note = 2'-O-methyladenosine-3'-phosphate
  modified_base 16: mod_base = OTHER; note = 2'-O-methylcytidine-3'-phosphate
  modified_base 17: mod_base = OTHER; note = 2'-O-methylcytidine-3'-phosphate
  modified_base 18: mod_base = OTHER; note = 2'-O-methyluridine-3'-phosphate
  modified_base 19: mod_base = OTHER; note = 2'-O-methyluridine-3'-phosphate
  modified_base 20: mod_base = OTHER; note = 2'-O-methylcytidine-3'-phosphate
  modified_base 21: mod_base = OTHER; note = 2'-O-methyluridine-3'-phosphate ((2S,4R)-1-[29-[[2-(acetylamino)-2-deoxy-beta-D-galactopyra nosyl]oxy]-14,14-bis[[3-[[3-[[5-[[2-(acetylamino)-2-deoxy-b eta-D-galactopyranosyl]oxy]-1-oxopentyl]amino]propyl]amino] -3-oxopropoxy]methyl]-1,12,19,25-tetraoxo-16-oxa-13,20,24-t riazanonacos-1-yl]-4-hydroxy-2-pyrrolidinyl)methyl ester
cacagggaacctctaccttct

SEQ ID NO: 662 - RNA, 21 nt, synthetic construct
  source 1..21: mol_type = other RNA
  modified_base 1: mod_base = OTHER; note = 2'-O-methylcytidine-3'-phosphorothioate
  modified_base 2: mod_base = OTHER; note = 2'-O-methyladenosine-3'-phosphorothioate
  modified_base 3: mod_base = OTHER; note = 2'-O-methylguanosine-3'-phosphate
  modified_base 4: mod_base = OTHER; note = 2'-O-methylguanosine-3'-phosphate
  modified_base 5: mod_base = OTHER; note = 2'-O-methylguanosine-3'-phosphate
  modified_base 6: mod_base = OTHER; note = 2'-O-methyladenosine-3'-phosphate
  modified_base 7: mod_base = OTHER; note = 2'-deoxy-2'-fluoroadenosine-3'-phosphate
  modified_base 8: mod_base = OTHER; note = 2'-O-methylcytidine-3'-phosphate
  modified_base 9: mod_base = OTHER; note = 2'-deoxy-2'-fluorocytidine-3'-phosphate
  modified_base 10: mod_base = OTHER; note = 2'-deoxy-2'-fluorouridine-3'-phosphate
  modified_base 11: mod_base = OTHER; note = 2'-deoxy-2'-fluorocytidine-3'-phosphate
  modified_base 12: mod_base = OTHER; note = 2'-O-methyluridine-3'-phosphate
  modified_base 13: mod_base = OTHER; note = 2'-O-methyladenosine-3'-phosphate
  modified_base 14: mod_base = OTHER; note = 2'-O-methylcytidine-3'-phosphate
  modified_base 15: mod_base = OTHER; note = 2'-O-methylcytidine-3'-phosphate
  modified_base 16: mod_base = OTHER; note = 2'-O-methyluridine-3'-phosphate
  modified_base 17: mod_base = OTHER; note = 2'-O-methyluridine-3'-phosphate
  modified_base 18: mod_base = OTHER; note = 2'-O-methylcytidine-3'-phosphate
  modified_base 19: mod_base = OTHER; note = 2'-O-methyluridine-3'-phosphate
  modified_base 20: mod_base = OTHER; note = 2'-O-methylcytidine-3'-phosphate
  modified_base 21: mod_base = OTHER; note = 2'-O-methyluridine-3'-phosphate ((2S,4R)-1-[29-[[2-(acetylamino)-2-deoxy-beta-D-galactopyra nosyl]oxy]-14,14-bis[[3-[[3-[[5-[[2-(acetylamino)-2-deoxy-b eta-D-galactopyranosyl]oxy]-1-oxopentyl]amino]propyl]amino] -3-oxopropoxy]methyl]-1,12,19,25-tetraoxo-16-oxa-13,20,24-t riazanonacos-1-yl]-4-hydroxy-2-pyrrolidinyl)methyl ester
cagggaacctctaccttctct

SEQ ID NO: 663 - RNA, 21 nt, synthetic construct
  source 1..21: mol_type = other RNA
  modified_base 1: mod_base = OTHER; note = 2'-O-methyladenosine-3'-phosphorothioate
  modified_base 2: mod_base = OTHER; note = 2'-O-methylguanosine-3'-phosphorothioate
  modified_base 3: mod_base = OTHER; note = 2'-O-methylguanosine-3'-phosphate
  modified_base 4: mod_base = OTHER; note = 2'-O-methylguanosine-3'-phosphate
  modified_base 5: mod_base = OTHER; note = 2'-O-methyladenosine-3'-phosphate
  modified_base 6: mod_base = OTHER; note = 2'-O-methyladenosine-3'-phosphate
  modified_base 7: mod_base = OTHER; note = 2'-deoxy-2'-fluorocytidine-3'-phosphate
  modified_base 8: mod_base = OTHER; note = 2'-O-methylcytidine-3'-phosphate
  modified_base 9: mod_base = OTHER; note = 2'-deoxy-2'-fluorouridine-3'-phosphate
  modified_base 10: mod_base = OTHER; note = 2'-deoxy-2'-fluorocytidine-3'-phosphate
  modified_base 11: mod_base = OTHER; note = 2'-deoxy-2'-fluorouridine-3'-phosphate
  modified_base 12: mod_base = OTHER; note = 2'-O-methyladenosine-3'-phosphate
  modified_base 13: mod_base = OTHER; note = 2'-O-methylcytidine-3'-phosphate
  modified_base 14: mod_base = OTHER; note = 2'-O-methylcytidine-3'-phosphate
  modified_base 15: mod_base = OTHER; note = 2'-O-methyluridine-3'-phosphate
  modified_base 16: mod_base = OTHER; note = 2'-O-methyluridine-3'-phosphate
  modified_base 17: mod_base = OTHER; note = 2'-O-methylcytidine-3'-phosphate
  modified_base 18: mod_base = OTHER; note = 2'-O-methyluridine-3'-phosphate
  modified_base 19: mod_base = OTHER; note = 2'-O-methylcytidine-3'-phosphate
  modified_base 20: mod_base = OTHER; note = 2'-O-methyluridine-3'-phosphate
  modified_base 21: mod_base = OTHER; note = 2'-O-methyluridine-3'-phosphate ((2S,4R)-1-[29-[[2-(acetylamino)-2-deoxy-beta-D-galactopyra nosyl]oxy]-14,14-bis[[3-[[3-[[5-[[2-(acetylamino)-2-deoxy-b eta-D-galactopyranosyl]oxy]-1-oxopentyl]amino]propyl]amino] -3-oxopropoxy]methyl]-1,12,19,25-tetraoxo-16-oxa-13,20,24-t riazanonacos-1-yl]-4-hydroxy-2-pyrrolidinyl)methyl ester
agggaacctctaccttctctt

SEQ ID NO: 664 - RNA, 21 nt, synthetic construct
  source 1..21: mol_type = other RNA
  modified_base 1: mod_base = OTHER; note = 2'-O-methylguanosine-3'-phosphorothioate
  modified_base 2: mod_base = OTHER; note = 2'-O-methylguanosine-3'-phosphorothioate
  modified_base 3: mod_base = OTHER; note = 2'-O-methylguanosine-3'-phosphate
  modified_base 4: mod_base = OTHER; note = 2'-O-methyladenosine-3'-phosphate
  modified_base 5: mod_base = OTHER; note = 2'-O-methyladenosine-3'-phosphate
  modified_base 6: mod_base = OTHER; note = 2'-O-methylcytidine-3'-phosphate
  modified_base 7: mod_base = OTHER; note = 2'-deoxy-2'-fluorocytidine-3'-phosphate
  modified_base 8: mod_base = OTHER; note = 2'-O-methyluridine-3'-phosphate
  modified_base 9: mod_base = OTHER; note = 2'-deoxy-2'-fluorocytidine-3'-phosphate
  modified_base 10: mod_base = OTHER; note = 2'-deoxy-2'-fluorouridine-3'-phosphate
  modified_base 11: mod_base = OTHER; note = 2'-deoxy-2'-fluoroadenosine-3'-phosphate
  modified_base 12: mod_base = OTHER; note = 2'-O-methylcytidine-3'-phosphate
  modified_base 13: mod_base = OTHER; note = 2'-O-methylcytidine-3'-phosphate
  modified_base 14: mod_base = OTHER; note = 2'-O-methyluridine-3'-phosphate
  modified_base 15: mod_base = OTHER; note = 2'-O-methyluridine-3'-phosphate
  modified_base 16: mod_base = OTHER; note = 2'-O-methylcytidine-3'-phosphate
  modified_base 17: mod_base = OTHER; note = 2'-O-methyluridine-3'-phosphate
  modified_base 18: mod_base = OTHER; note = 2'-O-methylcytidine-3'-phosphate
  modified_base 19: mod_base = OTHER; note = 2'-O-methyluridine-3'-phosphate
  modified_base 20: mod_base = OTHER; note = 2'-O-methylcytidine-3'-phosphate
  modified_base 21: mod_base = OTHER; note = 2'-O-methyluridine-3'-phosphate ((2S,4R)-1-[29-[[2-(acetylamino)-2-deoxy-beta-D-galactopyra nosyl]oxy]-14,14-bis[[3-[[3-[[5-[[2-(acetylamino)-2-deoxy-b eta-D-galactopyranosyl]oxy]-1-oxopentyl]amino]propyl]amino] -3-oxopropoxy]methyl]-1,12,19,25-tetraoxo-16-oxa-13,20,24-t riazanonacos-1-yl]-4-hydroxy-2-pyrrolidinyl)methyl ester
gggaacctctaccttctctct

SEQ ID NO: 665 - RNA, 21 nt, synthetic construct
  source 1..21: mol_type = other RNA
  modified_base 1: mod_base = OTHER; note = 2'-O-methylcytidine-3'-phosphorothioate
  modified_base 2: mod_base = OTHER; note = 2'-O-methyladenosine-3'-phosphorothioate
  modified_base 3: mod_base = OTHER; note = 2'-O-methyladenosine-3'-phosphate
  modified_base 4: mod_base = OTHER; note = 2'-O-methylguanosine-3'-phosphate
  modified_base 5: mod_base = OTHER; note = 2'-O-methylguanosine-3'-phosphate
  modified_base 6: mod_base = OTHER; note = 2'-O-methyluridine-3'-phosphate
  modified_base 7: mod_base = OTHER; note = 2'-deoxy-2'-fluoroguanosine-3'-phosphate
  modified_base 8: mod_base = OTHER; note = 2'-O-methylcytidine-3'-phosphate
  modified_base 9: mod_base = OTHER; note = 2'-deoxy-2'-fluorouridine-3'-phosphate
  modified_base 10: mod_base = OTHER; note = 2'-deoxy-2'-fluoroguanosine-3'-phosphate
  modified_base 11: mod_base = OTHER; note = 2'-deoxy-2'-fluoroguanosine-3'-phosphate
  modified_base 12: mod_base = OTHER; note = 2'-O-methylguanosine-3'-phosphate
  modified_base 13: mod_base = OTHER; note = 2'-O-methyladenosine-3'-phosphate
  modified_base 14: mod_base = OTHER; note = 2'-O-methylguanosine-3'-phosphate
  modified_base 15: mod_base = OTHER; note = 2'-O-methyladenosine-3'-phosphate
  modified_base 16: mod_base = OTHER; note = 2'-O-methylguanosine-3'-phosphate
  modified_base 17: mod_base = OTHER; note = 2'-O-methyladenosine-3'-phosphate
  modified_base 18: mod_base = OTHER; note = 2'-O-methyluridine-3'-phosphate
  modified_base 19: mod_base = OTHER; note = 2'-O-methyladenosine-3'-phosphate
  modified_base 20: mod_base = OTHER; note = 2'-O-methyluridine-3'-phosphate
  modified_base 21: mod_base = OTHER; note = 2'-O-methyluridine-3'-phosphate ((2S,4R)-1-[29-[[2-(acetylamino)-2-deoxy-beta-D-galactopyra nosyl]oxy]-14,14-bis[[3-[[3-[[5-[[2-(acetylamino)-2-deoxy-b eta-D-galactopyranosyl]oxy]-1-oxopentyl]amino]propyl]amino] -3-oxopropoxy]methyl]-1,12,19,25-tetraoxo-16-oxa-13,20,24-t riazanonacos-1-yl]-4-hydroxy-2-pyrrolidinyl)methyl ester
caaggtgctgggagagatatt

SEQ ID NO: 666 - RNA, 21 nt, synthetic construct
  source 1..21: mol_type = other RNA
  modified_base 1: mod_base = OTHER; note = 2'-O-methyladenosine-3'-phosphorothioate
  modified_base 2: mod_base = OTHER; note = 2'-O-methyladenosine-3'-phosphorothioate
  modified_base 3: mod_base = OTHER; note = 2'-O-methylguanosine-3'-phosphate
  modified_base 4: mod_base = OTHER; note = 2'-O-methylguanosine-3'-phosphate
  modified_base 5: mod_base = OTHER; note = 2'-O-methyluridine-3'-phosphate
  modified_base 6: mod_base = OTHER; note = 2'-O-methylguanosine-3'-phosphate
  modified_base 7: mod_base = OTHER; note = 2'-deoxy-2'-fluorocytidine-3'-phosphate
  modified_base 8: mod_base = OTHER; note = 2'-O-methyluridine-3'-phosphate
  modified_base 9: mod_base = OTHER; note = 2'-deoxy-2'-fluoroguanosine-3'-phosphate
  modified_base 10: mod_base = OTHER; note = 2'-deoxy-2'-fluoroguanosine-3'-phosphate
  modified_base 11: mod_base = OTHER; note = 2'-deoxy-2'-fluoroguanosine-3'-phosphate
  modified_base 12: mod_base = OTHER; note = 2'-O-methyladenosine-3'-phosphate
  modified_base 13: mod_base = OTHER; note = 2'-O-methylguanosine-3'-phosphate
  modified_base 14: mod_base = OTHER; note = 2'-O-methyladenosine-3'-phosphate
  modified_base 15: mod_base = OTHER; note = 2'-O-methylguanosine-3'-phosphate
  modified_base 16: mod_base = OTHER; note = 2'-O-methyladenosine-3'-phosphate
  modified_base 17: mod_base = OTHER; note = 2'-O-methyluridine-3'-phosphate
  modified_base 18: mod_base = OTHER; note = 2'-O-methyladenosine-3'-phosphate
  modified_base 19: mod_base = OTHER; note = 2'-O-methyluridine-3'-phosphate
  modified_base 20: mod_base = OTHER; note = 2'-O-methylguanosine-3'-phosphate
  modified_base 21: mod_base = OTHER; note = 2'-O-methyluridine-3'-phosphate ((2S,4R)-1-[29-[[2-(acetylamino)-2-deoxy-beta-D-galactopyra nosyl]oxy]-14,14-bis[[3-[[3-[[5-[[2-(acetylamino)-2-deoxy-b eta-D-galactopyranosyl]oxy]-1-oxopentyl]amino]propyl]amino] -3-oxopropoxy]methyl]-1,12,19,25-tetraoxo-16-oxa-13,20,24-t riazanonacos-1-yl]-4-hydroxy-2-pyrrolidinyl)methyl ester
aaggtgctgggagagatatgt

SEQ ID NO: 667 - RNA, 21 nt, synthetic construct
  source 1..21: mol_type = other RNA
  modified_base 1: mod_base = OTHER; note = 2'-O-methyladenosine-3'-phosphorothioate
  modified_base 2: mod_base = OTHER; note = 2'-O-methylguanosine-3'-phosphorothioate
  modified_base 3: mod_base = OTHER; note = 2'-O-methylguanosine-3'-phosphate
  modified_base 4: mod_base = OTHER; note = 2'-O-methyluridine-3'-phosphate
  modified_base 5: mod_base = OTHER; note = 2'-O-methylguanosine-3'-phosphate
  modified_base 6: mod_base = OTHER; note = 2'-O-methylcytidine-3'-phosphate
  modified_base 7: mod_base = OTHER; note = 2'-deoxy-2'-fluorouridine-3'-phosphate
  modified_base 8: mod_base = OTHER; note = 2'-O-methylguanosine-3'-phosphate
  modified_base 9: mod_base = OTHER; note = 2'-deoxy-2'-fluoroguanosine-3'-phosphate
  modified_base 10: mod_base = OTHER; note = 2'-deoxy-2'-fluoroguanosine-3'-phosphate
  modified_base 11: mod_base = OTHER; note = 2'-deoxy-2'-fluoroadenosine-3'-phosphate
  modified_base 12: mod_base = OTHER; note = 2'-O-methylguanosine-3'-phosphate
  modified_base 13: mod_base = OTHER; note = 2'-O-methyladenosine-3'-phosphate
  modified_base 14: mod_base = OTHER; note = 2'-O-methylguanosine-3'-phosphate
  modified_base 15: mod_base = OTHER; note = 2'-O-methyladenosine-3'-phosphate
  modified_base 16: mod_base = OTHER; note = 2'-O-methyluridine-3'-phosphate
  modified_base 17: mod_base = OTHER; note = 2'-O-methyladenosine-3'-phosphate
  modified_base 18: mod_base = OTHER; note = 2'-O-methyluridine-3'-phosphate
  modified_base 19: mod_base = OTHER; note = 2'-O-methylguanosine-3'-phosphate
  modified_base 20: mod_base = OTHER; note = 2'-O-methylcytidine-3'-phosphate
  modified_base 21: mod_base = OTHER; note = 2'-O-methyluridine-3'-phosphate ((2S,4R)-1-[29-[[2-(acetylamino)-2-deoxy-beta-D-galactopyra nosyl]oxy]-14,14-bis[[3-[[3-[[5-[[2-(acetylamino)-2-deoxy-b eta-D-galactopyranosyl]oxy]-1-oxopentyl]amino]propyl]amino] -3-oxopropoxy]methyl]-1,12,19,25-tetraoxo-16-oxa-13,20,24-t riazanonacos-1-yl]-4-hydroxy-2-pyrrolidinyl)methyl ester
aggtgctgggagagatatgct

SEQ ID NO: 668 - RNA, 21 nt, synthetic construct
  source 1..21: mol_type = other RNA
  modified_base 1: mod_base = OTHER; note = 2'-O-methylguanosine-3'-phosphorothioate
  modified_base 2: mod_base = OTHER; note = 2'-O-methylguanosine-3'-phosphorothioate
  modified_base 3: mod_base = OTHER; note = 2'-O-methyluridine-3'-phosphate
  modified_base 4: mod_base = OTHER; note = 2'-O-methylguanosine-3'-phosphate
  modified_base 5: mod_base = OTHER; note = 2'-O-methylcytidine-3'-phosphate
  modified_base 6: mod_base = OTHER; note = 2'-O-methyluridine-3'-phosphate
  modified_base 7: mod_base = OTHER; note = 2'-deoxy-2'-fluoroguanosine-3'-phosphate
  modified_base 8: mod_base = OTHER; note = 2'-O-methylguanosine-3'-phosphate
  modified_base 9: mod_base = OTHER; note = 2'-deoxy-2'-fluoroguanosine-3'-phosphate
  modified_base 10: mod_base = OTHER; note = 2'-deoxy-2'-fluoroadenosine-3'-phosphate
  modified_base 11: mod_base = OTHER; note = 2'-deoxy-2'-fluoroguanosine-3'-phosphate
  modified_base 12: mod_base = OTHER; note = 2'-O-methyladenosine-3'-phosphate
  modified_base 13: mod_base = OTHER; note = 2'-O-methylguanosine-3'-phosphate
  modified_base 14: mod_base = OTHER; note = 2'-O-methyladenosine-3'-phosphate
  modified_base 15: mod_base = OTHER; note = 2'-O-methyluridine-3'-phosphate
  modified_base 16: mod_base = OTHER; note = 2'-O-methyladenosine-3'-phosphate
  modified_base 17: mod_base = OTHER; note = 2'-O-methyluridine-3'-phosphate
  modified_base 18: mod_base = OTHER; note = 2'-O-methylguanosine-3'-phosphate
  modified_base 19: mod_base = OTHER; note = 2'-O-methylcytidine-3'-phosphate
  modified_base 20: mod_base = OTHER; note = 2'-O-methylcytidine-3'-phosphate
  modified_base 21: mod_base = OTHER; note = 2'-O-methyluridine-3'-phosphate ((2S,4R)-1-[29-[[2-(acetylamino)-2-deoxy-beta-D-galactopyra nosyl]oxy]-14,14-bis[[3-[[3-[[5-[[2-(acetylamino)-2-deoxy-b eta-D-galactopyranosyl]oxy]-1-oxopentyl]amino]propyl]amino] -3-oxopropoxy]methyl]-1,12,19,25-tetraoxo-16-oxa-13,20,24-t riazanonacos-1-yl]-4-hydroxy-2-pyrrolidinyl)methyl ester
ggtgctgggagagatatgcct

SEQ ID NO: 669 - RNA, 21 nt, synthetic construct
  source 1..21: mol_type = other RNA
  modified_base 1: mod_base = OTHER; note = 2'-O-methylguanosine-3'-phosphorothioate
  modified_base 2: mod_base = OTHER; note = 2'-O-methyluridine-3'-phosphorothioate
  modified_base 3: mod_base = OTHER; note = 2'-O-methylguanosine-3'-phosphate
  modified_base 4: mod_base = OTHER; note = 2'-O-methylcytidine-3'-phosphate
  modified_base 5: mod_base = OTHER; note = 2'-O-methyluridine-3'-phosphate
  modified_base 6: mod_base = OTHER; note = 2'-O-methylguanosine-3'-phosphate
  modified_base 7: mod_base = OTHER; note = 2'-deoxy-2'-fluoroguanosine-3'-phosphate
  modified_base 8: mod_base = OTHER; note = 2'-O-methylguanosine-3'-phosphate
  modified_base 9: mod_base = OTHER; note = 2'-deoxy-2'-fluoroadenosine-3'-phosphate
  modified_base 10: mod_base = OTHER; note = 2'-deoxy-2'-fluoroguanosine-3'-phosphate
  modified_base 11: mod_base = OTHER; note = 2'-deoxy-2'-fluoroadenosine-3'-phosphate
  modified_base 12: mod_base = OTHER; note = 2'-O-methylguanosine-3'-phosphate
  modified_base 13: mod_base = OTHER; note = 2'-O-methyladenosine-3'-phosphate
  modified_base 14: mod_base = OTHER; note = 2'-O-methyluridine-3'-phosphate
  modified_base 15: mod_base = OTHER; note = 2'-O-methyladenosine-3'-phosphate
  modified_base 16: mod_base = OTHER; note = 2'-O-methyluridine-3'-phosphate
  modified_base 17: mod_base = OTHER; note = 2'-O-methylguanosine-3'-phosphate
  modified_base 18: mod_base = OTHER; note = 2'-O-methylcytidine-3'-phosphate
  modified_base 19: mod_base = OTHER; note = 2'-O-methylcytidine-3'-phosphate
  modified_base 20: mod_base = OTHER; note = 2'-O-methyluridine-3'-phosphate
  modified_base 21: mod_base = OTHER; note = 2'-O-methyluridine-3'-phosphate ((2S,4R)-1-[29-[[2-(acetylamino)-2-deoxy-beta-D-galactopyra nosyl]oxy]-14,14-bis[[3-[[3-[[5-[[2-(acetylamino)-2-deoxy-b eta-D-galactopyranosyl]oxy]-1-oxopentyl]amino]propyl]amino] -3-oxopropoxy]methyl]-1,12,19,25-tetraoxo-16-oxa-13,20,24-t riazanonacos-1-yl]-4-hydroxy-2-pyrrolidinyl)methyl ester
gtgctgggagagatatgcctt

SEQ ID NO: 670 - RNA, 21 nt, synthetic construct
  source 1..21: mol_type = other RNA
  modified_base 1: mod_base = OTHER; note = 2'-O-methyluridine-3'-phosphorothioate
  modified_base 2: mod_base = OTHER; note = 2'-O-methylguanosine-3'-phosphorothioate
  modified_base 3: mod_base = OTHER; note = 2'-O-methylcytidine-3'-phosphate
  modified_base 4: mod_base = OTHER; note = 2'-O-methyluridine-3'-phosphate
  modified_base 5: mod_base = OTHER; note = 2'-O-methylguanosine-3'-phosphate
  modified_base 6: mod_base = OTHER; note = 2'-O-methylguanosine-3'-phosphate
  modified_base 7: mod_base = OTHER; note = 2'-deoxy-2'-fluoroguanosine-3'-phosphate
  modified_base 8: mod_base = OTHER; note = 2'-O-methyladenosine-3'-phosphate
  modified_base 9: mod_base = OTHER; note = 2'-deoxy-2'-fluoroguanosine-3'-phosphate
  modified_base 10: mod_base = OTHER; note = 2'-deoxy-2'-fluoroadenosine-3'-phosphate
  modified_base 11: mod_base = OTHER; note = 2'-deoxy-2'-fluoroguanosine-3'-phosphate
  modified_base 12: mod_base = OTHER; note = 2'-O-methyladenosine-3'-phosphate
  modified_base 13: mod_base = OTHER; note = 2'-O-methyluridine-3'-phosphate
  modified_base 14: mod_base = OTHER; note = 2'-O-methyladenosine-3'-phosphate
  modified_base 15: mod_base = OTHER; note = 2'-O-methyluridine-3'-phosphate
  modified_base 16: mod_base = OTHER; note = 2'-O-methylguanosine-3'-phosphate
  modified_base 17: mod_base = OTHER; note = 2'-O-methylcytidine-3'-phosphate
  modified_base 18: mod_base = OTHER; note = 2'-O-methylcytidine-3'-phosphate
  modified_base 19: mod_base = OTHER; note = 2'-O-methyluridine-3'-phosphate
  modified_base 20: mod_base = OTHER; note = 2'-O-methyluridine-3'-phosphate
  modified_base 21: mod_base = OTHER; note = 2'-O-methyluridine-3'-phosphate ((2S,4R)-1-[29-[[2-(acetylamino)-2-deoxy-beta-D-galactopyra nosyl]oxy]-14,14-bis[[3-[[3-[[5-[[2-(acetylamino)-2-deoxy-b eta-D-galactopyranosyl]oxy]-1-oxopentyl]amino]propyl]amino] -3-oxopropoxy]methyl]-1,12,19,25-tetraoxo-16-oxa-13,20,24-t riazanonacos-1-yl]-4-hydroxy-2-pyrrolidinyl)methyl ester
tgctgggagagatatgccttt

SEQ ID NO: 671 - RNA, 21 nt, synthetic construct
  source 1..21: mol_type = other RNA
  modified_base 1: mod_base = OTHER; note = 2'-O-methyluridine-3'-phosphorothioate
  modified_base 2: mod_base = OTHER; note = 2'-O-methylguanosine-3'-phosphorothioate
  modified_base 3: mod_base = OTHER; note = 2'-O-methylguanosine-3'-phosphate
  modified_base 4: mod_base = OTHER; note = 2'-O-methylguanosine-3'-phosphate
  modified_base 5: mod_base = OTHER; note = 2'-O-methyladenosine-3'-phosphate
  modified_base 6: mod_base = OTHER; note = 2'-O-methylguanosine-3'-phosphate
  modified_base 7: mod_base = OTHER; note = 2'-deoxy-2'-fluoroadenosine-3'-phosphate
  modified_base 8: mod_base = OTHER; note = 2'-O-methylguanosine-3'-phosphate
  modified_base 9: mod_base = OTHER; note = 2'-deoxy-2'-fluoroadenosine-3'-phosphate
  modified_base 10: mod_base = OTHER; note = 2'-deoxy-2'-fluorouridine-3'-phosphate
  modified_base 11: mod_base = OTHER; note = 2'-deoxy-2'-fluoroadenosine-3'-phosphate
  modified_base 12: mod_base = OTHER; note = 2'-O-methyluridine-3'-phosphate
  modified_base 13: mod_base = OTHER; note = 2'-O-methylguanosine-3'-phosphate
  modified_base 14: mod_base = OTHER; note = 2'-O-methylcytidine-3'-phosphate
  modified_base 15: mod_base = OTHER; note = 2'-O-methylcytidine-3'-phosphate
  modified_base 16: mod_base = OTHER; note = 2'-O-methyluridine-3'-phosphate
  modified_base 17: mod_base = OTHER; note = 2'-O-methyluridine-3'-phosphate
  modified_base 18: mod_base = OTHER; note = 2'-O-methylcytidine-3'-phosphate
  modified_base 19: mod_base = OTHER; note = 2'-O-methylguanosine-3'-phosphate
  modified_base 20: mod_base = OTHER; note = 2'-O-methyladenosine-3'-phosphate
  modified_base 21: mod_base = OTHER; note = 2'-O-methyluridine-3'-phosphate ((2S,4R)-1-[29-[[2-(acetylamino)-2-deoxy-beta-D-galactopyra nosyl]oxy]-14,14-bis[[3-[[3-[[5-[[2-(acetylamino)-2-deoxy-b eta-D-galactopyranosyl]oxy]-1-oxopentyl]amino]propyl]amino] -3-oxopropoxy]methyl]-1,12,19,25-tetraoxo-16-oxa-13,20,24-t riazanonacos-1-yl]-4-hydroxy-2-pyrrolidinyl)methyl ester
tgggagagatatgccttcgat

SEQ ID NO: 672 - RNA, 21 nt, synthetic construct
  source 1..21: mol_type = other RNA
  modified_base 1: mod_base = OTHER; note = 2'-O-methylguanosine-3'-phosphorothioate
  modified_base 2: mod_base = OTHER; note = 2'-O-methylguanosine-3'-phosphorothioate
  modified_base 3: mod_base = OTHER; note = 2'-O-methylguanosine-3'-phosphate
  modified_base 4: mod_base = OTHER; note = 2'-O-methyladenosine-3'-phosphate
  modified_base 5: mod_base = OTHER; note = 2'-O-methylguanosine-3'-phosphate
  modified_base 6: mod_base = OTHER; note = 2'-O-methyladenosine-3'-phosphate
  modified_base 7: mod_base = OTHER; note = 2'-deoxy-2'-fluoroguanosine-3'-phosphate
  modified_base 8: mod_base = OTHER; note = 2'-O-methyladenosine-3'-phosphate
  modified_base 9: mod_base = OTHER; note = 2'-deoxy-2'-fluorouridine-3'-phosphate
  modified_base 10: mod_base = OTHER; note = 2'-deoxy-2'-fluoroadenosine-3'-phosphate
  modified_base 11: mod_base = OTHER; note = 2'-deoxy-2'-fluorouridine-3'-phosphate
  modified_base 12: mod_base = OTHER; note = 2'-O-methylguanosine-3'-phosphate
  modified_base 13: mod_base = OTHER; note = 2'-O-methylcytidine-3'-phosphate
  modified_base 14: mod_base = OTHER; note = 2'-O-methylcytidine-3'-phosphate
  modified_base 15: mod_base = OTHER; note = 2'-O-methyluridine-3'-phosphate
  modified_base 16: mod_base = OTHER; note = 2'-O-methyluridine-3'-phosphate
  modified_base 17: mod_base = OTHER; note = 2'-O-methylcytidine-3'-phosphate
  modified_base 18: mod_base = OTHER; note = 2'-O-methylguanosine-3'-phosphate
  modified_base 19: mod_base = OTHER; note = 2'-O-methyladenosine-3'-phosphate
  modified_base 20: mod_base = OTHER; note = 2'-O-methylguanosine-3'-phosphate
  modified_base 21: mod_base = OTHER; note = 2'-O-methyluridine-3'-phosphate ((2S,4R)-1-[29-[[2-(acetylamino)-2-deoxy-beta-D-galactopyra nosyl]oxy]-14,14-bis[[3-[[3-[[5-[[2-(acetylamino)-2-deoxy-b eta-D-galactopyranosyl]oxy]-1-oxopentyl]amino]propyl]amino] -3-oxopropoxy]methyl]-1,12,19,25-tetraoxo-16-oxa-13,20,24-t riazanonacos-1-yl]-4-hydroxy-2-pyrrolidinyl)methyl ester
gggagagatatgccttcgagt

SEQ ID NO: 673 - RNA, 21 nt, synthetic construct
  source 1..21: mol_type = other RNA
  modified_base 1: mod_base = OTHER; note = 2'-O-methylguanosine-3'-phosphorothioate
  modified_base 2: mod_base = OTHER; note = 2'-O-methylguanosine-3'-phosphorothioate
  modified_base 3: mod_base = OTHER; note = 2'-O-methyladenosine-3'-phosphate
  modified_base 4: mod_base = OTHER; note = 2'-O-methylguanosine-3'-phosphate
  modified_base 5: mod_base = OTHER; note = 2'-O-methyladenosine-3'-phosphate
  modified_base 6: mod_base = OTHER; note = 2'-O-methylguanosine-3'-phosphate
  modified_base 7: mod_base = OTHER; note = 2'-deoxy-2'-fluoroadenosine-3'-phosphate
  modified_base 8: mod_base = OTHER; note = 2'-O-methyluridine-3'-phosphate
  modified_base 9: mod_base = OTHER; note = 2'-deoxy-2'-fluoroadenosine-3'-phosphate
  modified_base 10: mod_base = OTHER; note = 2'-deoxy-2'-fluorouridine-3'-phosphate
  modified_base 11: mod_base = OTHER; note = 2'-deoxy-2'-fluoroguanosine-3'-phosphate
  modified_base 12: mod_base = OTHER; note = 2'-O-methylcytidine-3'-phosphate
  modified_base 13: mod_base = OTHER; note = 2'-O-methylcytidine-3'-phosphate
  modified_base 14: mod_base = OTHER; note = 2'-O-methyluridine-3'-phosphate
  modified_base 15: mod_base = OTHER; note = 2'-O-methyluridine-3'-phosphate
  modified_base 16: mod_base = OTHER; note = 2'-O-methylcytidine-3'-phosphate
  modified_base 17: mod_base = OTHER; note = 2'-O-methylguanosine-3'-phosphate
  modified_base 18: mod_base = OTHER; note = 2'-O-methyladenosine-3'-phosphate
  modified_base 19: mod_base = OTHER; note = 2'-O-methylguanosine-3'-phosphate
  modified_base 20: mod_base = OTHER; note = 2'-O-methylguanosine-3'-phosphate
  modified_base 21: mod_base = OTHER; note = 2'-O-methyluridine-3'-phosphate ((2S,4R)-1-[29-[[2-(acetylamino)-2-deoxy-beta-D-galactopyra nosyl]oxy]-14,14-bis[[3-[[3-[[5-[[2-(acetylamino)-2-deoxy-b eta-D-galactopyranosyl]oxy]-1-oxopentyl]amino]propyl]amino] -3-oxopropoxy]methyl]-1,12,19,25-tetraoxo-16-oxa-13,20,24-t riazanonacos-1-yl]-4-hydroxy-2-pyrrolidinyl)methyl ester
ggagagatatgccttcgaggt

SEQ ID NO: 674 - RNA, 21 nt, synthetic construct
  source 1..21: mol_type = other RNA
  modified_base 1: mod_base = OTHER; note = 2'-O-methylguanosine-3'-phosphorothioate
  modified_base 2: mod_base = OTHER; note = 2'-O-methyladenosine-3'-phosphorothioate
  modified_base 3: mod_base = OTHER; note = 2'-O-methylguanosine-3'-phosphate
  modified_base 4: mod_base = OTHER; note = 2'-O-methyladenosine-3'-phosphate
  modified_base 5: mod_base = OTHER; note = 2'-O-methylguanosine-3'-phosphate
  modified_base 6: mod_base = OTHER; note = 2'-O-methyladenosine-3'-phosphate
  modified_base 7: mod_base = OTHER; note = 2'-deoxy-2'-fluorouridine-3'-phosphate
  modified_base 8: mod_base = OTHER; note = 2'-O-methyladenosine-3'-phosphate
  modified_base 9: mod_base = OTHER; note = 2'-deoxy-2'-fluorouridine-3'-phosphate
  modified_base 10: mod_base = OTHER; note = 2'-deoxy-2'-fluoroguanosine-3'-phosphate
  modified_base 11: mod_base = OTHER; note = 2'-deoxy-2'-fluorocytidine-3'-phosphate
  modified_base 12: mod_base = OTHER; note = 2'-O-methylcytidine-3'-phosphate
  modified_base 13: mod_base = OTHER; note = 2'-O-methyluridine-3'-phosphate
  modified_base 14: mod_base = OTHER; note = 2'-O-methyluridine-3'-phosphate
  modified_base 15: mod_base = OTHER; note = 2'-O-methylcytidine-3'-phosphate
  modified_base 16: mod_base = OTHER; note = 2'-O-methylguanosine-3'-phosphate
  modified_base 17: mod_base = OTHER; note = 2'-O-methyladenosine-3'-phosphate
  modified_base 18: mod_base = OTHER; note = 2'-O-methylguanosine-3'-phosphate
  modified_base 19: mod_base = OTHER; note = 2'-O-methylguanosine-3'-phosphate
  modified_base 20: mod_base = OTHER; note = 2'-O-methyladenosine-3'-phosphate
  modified_base 21: mod_base = OTHER; note = 2'-O-methyluridine-3'-phosphate ((2S,4R)-1-[29-[[2-(acetylamino)-2-deoxy-beta-D-galactopyra nosyl]oxy]-14,14-bis[[3-[[3-[[5-[[2-(acetylamino)-2-deoxy-b eta-D-galactopyranosyl]oxy]-1-oxopentyl]amino]propyl]amino] -3-oxopropoxy]methyl]-1,12,19,25-tetraoxo-16-oxa-13,20,24-t riazanonacos-1-yl]-4-hydroxy-2-pyrrolidinyl)methyl ester
gagagatatgccttcgaggat

SEQ ID NO: 675 - RNA, 21 nt, synthetic construct
  source 1..21: mol_type = other RNA
  modified_base 1: mod_base = OTHER; note = 2'-O-methylguanosine-3'-phosphorothioate
  modified_base 2: mod_base = OTHER; note = 2'-O-methyladenosine-3'-phosphorothioate
  modified_base 3: mod_base = OTHER; note = 2'-O-methylguanosine-3'-phosphate
  modified_base 4: mod_base = OTHER; note = 2'-O-methyladenosine-3'-phosphate
  modified_base 5: mod_base = OTHER; note = 2'-O-methyluridine-3'-phosphate
  modified_base 6: mod_base = OTHER; note = 2'-O-methyladenosine-3'-phosphate
  modified_base 7: mod_base = OTHER; note = 2'-deoxy-2'-fluorouridine-3'-phosphate
  modified_base 8: mod_base = OTHER; note = 2'-O-methylguanosine-3'-phosphate
  modified_base 9: mod_base = OTHER; note = 2'-deoxy-2'-fluorocytidine-3'-phosphate
  modified_base 10: mod_base = OTHER; note = 2'-deoxy-2'-fluorocytidine-3'-phosphate
  modified_base 11: mod_base = OTHER; note = 2'-deoxy-2'-fluorouridine-3'-phosphate
  modified_base 12: mod_base = OTHER; note = 2'-O-methyluridine-3'-phosphate
  modified_base 13: mod_base = OTHER; note = 2'-O-methylcytidine-3'-phosphate
  modified_base 14: mod_base = OTHER; note = 2'-O-methylguanosine-3'-phosphate
  modified_base 15: mod_base = OTHER; note = 2'-O-methyladenosine-3'-phosphate
  modified_base 16: mod_base = OTHER; note = 2'-O-methylguanosine-3'-phosphate
  modified_base 17: mod_base = OTHER; note = 2'-O-methylguanosine-3'-phosphate
  modified_base 18: mod_base = OTHER; note = 2'-O-methyladenosine-3'-phosphate
  modified_base 19: mod_base = OTHER; note = 2'-O-methyluridine-3'-phosphate
  modified_base 20: mod_base = OTHER; note = 2'-O-methyladenosine-3'-phosphate
  modified_base 21: mod_base = OTHER; note = 2'-O-methyluridine-3'-phosphate ((2S,4R)-1-[29-[[2-(acetylamino)-2-deoxy-beta-D-galactopyra nosyl]oxy]-14,14-bis[[3-[[3-[[5-[[2-(acetylamino)-2-deoxy-b eta-D-galactopyranosyl]oxy]-1-oxopentyl]amino]propyl]amino] -3-oxopropoxy]methyl]-1,12,19,25-tetraoxo-16-oxa-13,20,24-t riazanonacos-1-yl]-4-hydroxy-2-pyrrolidinyl)methyl ester
gagatatgccttcgaggatat

SEQ ID NO: 676 - RNA, 21 nt, synthetic construct
  source 1..21: mol_type = other RNA
  modified_base 1: mod_base = OTHER; note = 2'-O-methylguanosine-3'-phosphorothioate
  modified_base 2: mod_base = OTHER; note = 2'-O-methyladenosine-3'-phosphorothioate
  modified_base 3: mod_base = OTHER; note = 2'-O-methyluridine-3'-phosphate
  modified_base 4: mod_base = OTHER; note = 2'-O-methyladenosine-3'-phosphate
  modified_base 5: mod_base = OTHER; note = 2'-O-methyluridine-3'-phosphate
  modified_base 6: mod_base = OTHER; note = 2'-O-methylguanosine-3'-phosphate
  modified_base 7: mod_base = OTHER; note = 2'-deoxy-2'-fluorocytidine-3'-phosphate
  modified_base 8: mod_base = OTHER; note = 2'-O-methylcytidine-3'-phosphate
  modified_base 9: mod_base = OTHER; note = 2'-deoxy-2'-fluorouridine-3'-phosphate
  modified_base 10: mod_base = OTHER; note = 2'-deoxy-2'-fluorouridine-3'-phosphate
  modified_base 11: mod_base = OTHER; note = 2'-deoxy-2'-fluorocytidine-3'-phosphate
  modified_base 12: mod_base = OTHER; note = 2'-O-methylguanosine-3'-phosphate
  modified_base 13: mod_base = OTHER; note = 2'-O-methyladenosine-3'-phosphate
  modified_base 14: mod_base = OTHER; note = 2'-O-methylguanosine-3'-phosphate
  modified_base 15: mod_base = OTHER; note = 2'-O-methylguanosine-3'-phosphate
  modified_base 16: mod_base = OTHER; note = 2'-O-methyladenosine-3'-phosphate
  modified_base 17: mod_base = OTHER; note = 2'-O-methyluridine-3'-phosphate
  modified_base 18: mod_base = OTHER; note = 2'-O-methyladenosine-3'-phosphate
  modified_base 19: mod_base = OTHER; note = 2'-O-methyluridine-3'-phosphate
  modified_base 20: mod_base = OTHER; note = 2'-O-methyluridine-3'-phosphate
  modified_base 21: mod_base = OTHER; note = 2'-O-methyluridine-3'-phosphate ((2S,4R)-1-[29-[[2-(acetylamino)-2-deoxy-beta-D-galactopyra nosyl]oxy]-14,14-bis[[3-[[3-[[5-[[2-(acetylamino)-2-deoxy-b eta-D-galactopyranosyl]oxy]-1-oxopentyl]amino]propyl]amino] -3-oxopropoxy]methyl]-1,12,19,25-tetraoxo-16-oxa-13,20,24-t riazanonacos-1-yl]-4-hydroxy-2-pyrrolidinyl)methyl ester
gatatgccttcgaggatattt

SEQ ID NO: 677 - RNA, 21 nt, synthetic construct
  source 1..21: mol_type = other RNA
  modified_base 1: mod_base = OTHER; note = 2'-O-methyladenosine-3'-phosphorothioate
  modified_base 2: mod_base = OTHER; note = 2'-O-methyluridine-3'-phosphorothioate
  modified_base 3: mod_base = OTHER; note = 2'-O-methyladenosine-3'-phosphate
  modified_base 4: mod_base = OTHER; note = 2'-O-methyluridine-3'-phosphate
  modified_base 5: mod_base = OTHER; note = 2'-O-methylguanosine-3'-phosphate
  modified_base 6: mod_base = OTHER; note = 2'-O-methylcytidine-3'-phosphate
  modified_base 7: mod_base = OTHER; note = 2'-deoxy-2'-fluorocytidine-3'-phosphate
  modified_base 8: mod_base = OTHER; note = 2'-O-methyluridine-3'-phosphate
  modified_base 9: mod_base = OTHER; note = 2'-deoxy-2'-fluorouridine-3'-phosphate
  modified_base 10: mod_base = OTHER; note = 2'-deoxy-2'-fluorocytidine-3'-phosphate
  modified_base 11: mod_base = OTHER; note = 2'-deoxy-2'-fluoroguanosine-3'-phosphate
  modified_base 12: mod_base = OTHER; note = 2'-O-methyladenosine-3'-phosphate
  modified_base 13: mod_base = OTHER; note = 2'-O-methylguanosine-3'-phosphate
  modified_base 14: mod_base = OTHER; note = 2'-O-methylguanosine-3'-phosphate
  modified_base 15: mod_base = OTHER; note = 2'-O-methyladenosine-3'-phosphate
  modified_base 16: mod_base = OTHER; note = 2'-O-methyluridine-3'-phosphate
  modified_base 17: mod_base = OTHER; note = 2'-O-methyladenosine-3'-phosphate
  modified_base 18: mod_base = OTHER; note = 2'-O-methyluridine-3'-phosphate
  modified_base 19: mod_base = OTHER; note = 2'-O-methyluridine-3'-phosphate
  modified_base 20: mod_base = OTHER; note = 2'-O-methyluridine-3'-phosphate
  modified_base 21: mod_base = OTHER; note = 2'-O-methyluridine-3'-phosphate ((2S,4R)-1-[29-[[2-(acetylamino)-2-deoxy-beta-D-galactopyra nosyl]oxy]-14,14-bis[[3-[[3-[[5-[[2-(acetylamino)-2-deoxy-b eta-D-galactopyranosyl]oxy]-1-oxopentyl]amino]propyl]amino] -3-oxopropoxy]methyl]-1,12,19,25-tetraoxo-16-oxa-13,20,24-t riazanonacos-1-yl]-4-hydroxy-2-pyrrolidinyl)methyl ester
atatgccttcgaggatatttt

SEQ ID NO: 678 - RNA, 21 nt, synthetic construct
  source 1..21: mol_type = other RNA
  modified_base 1: mod_base = OTHER; note = 2'-O-methyluridine-3'-phosphorothioate
  modified_base 2: mod_base = OTHER; note = 2'-O-methyladenosine-3'-phosphorothioate
  modified_base 3: mod_base = OTHER; note = 2'-O-methyluridine-3'-phosphate
  modified_base 4: mod_base = OTHER; note = 2'-O-methylguanosine-3'-phosphate
  modified_base 5: mod_base = OTHER; note = 2'-O-methylcytidine-3'-phosphate
  modified_base 6: mod_base = OTHER; note = 2'-O-methylcytidine-3'-phosphate
  modified_base 7: mod_base = OTHER; note = 2'-deoxy-2'-fluorouridine-3'-phosphate
  modified_base 8: mod_base = OTHER; note = 2'-O-methyluridine-3'-phosphate
  modified_base 9: mod_base = OTHER; note = 2'-deoxy-2'-fluorocytidine-3'-phosphate
  modified_base 10: mod_base = OTHER; note = 2'-deoxy-2'-fluoroguanosine-3'-phosphate
  modified_base 11: mod_base = OTHER; note = 2'-deoxy-2'-fluoroadenosine-3'-phosphate
  modified_base 12: mod_base = OTHER; note = 2'-O-methylguanosine-3'-phosphate
  modified_base 13: mod_base = OTHER; note = 2'-O-methylguanosine-3'-phosphate
  modified_base 14: mod_base = OTHER; note = 2'-O-methyladenosine-3'-phosphate
  modified_base 15: mod_base = OTHER; note = 2'-O-methyluridine-3'-phosphate
  modified_base 16: mod_base = OTHER; note = 2'-O-methyladenosine-3'-phosphate
  modified_base 17: mod_base = OTHER; note = 2'-O-methyluridine-3'-phosphate
  modified_base 18: mod_base = OTHER; note = 2'-O-methyluridine-3'-phosphate
  modified_base 19: mod_base = OTHER; note = 2'-O-methyluridine-3'-phosphate
  modified_base 20: mod_base = OTHER; note = 2'-O-methylguanosine-3'-phosphate
  modified_base 21: mod_base = OTHER; note = 2'-O-methyluridine-3'-phosphate ((2S,4R)-1-[29-[[2-(acetylamino)-2-deoxy-beta-D-galactopyra nosyl]oxy]-14,14-bis[[3-[[3-[[5-[[2-(acetylamino)-2-deoxy-b eta-D-galactopyranosyl]oxy]-1-oxopentyl]amino]propyl]amino] -3-oxopropoxy]methyl]-1,12,19,25-tetraoxo-16-oxa-13,20,24-t riazanonacos-1-yl]-4-hydroxy-2-pyrrolidinyl)methyl ester
tatgccttcgaggatatttgt

SEQ ID NO: 679 - RNA, 21 nt, synthetic construct
  source 1..21: mol_type = other RNA
  modified_base 1: mod_base = OTHER; note = 2'-O-methyladenosine-3'-phosphorothioate
  modified_base 2: mod_base = OTHER; note = 2'-O-methyluridine-3'-phosphorothioate
  modified_base 3: mod_base = OTHER; note = 2'-O-methylguanosine-3'-phosphate
  modified_base 4: mod_base = OTHER; note = 2'-O-methylcytidine-3'-phosphate
  modified_base 5: mod_base = OTHER; note = 2'-O-methylcytidine-3'-phosphate
  modified_base 6: mod_base = OTHER; note = 2'-O-methyluridine-3'-phosphate
  modified_base 7: mod_base = OTHER; note = 2'-deoxy-2'-fluorouridine-3'-phosphate
  modified_base 8: mod_base = OTHER; note = 2'-O-methylcytidine-3'-phosphate
  modified_base 9: mod_base = OTHER; note = 2'-deoxy-2'-fluoroguanosine-3'-phosphate
  modified_base 10: mod_base = OTHER; note = 2'-deoxy-2'-fluoroadenosine-3'-phosphate
  modified_base 11: mod_base = OTHER; note = 2'-deoxy-2'-fluoroguanosine-3'-phosphate
  modified_base 12: mod_base = OTHER; note = 2'-O-methylguanosine-3'-phosphate
  modified_base 13: mod_base = OTHER; note = 2'-O-methyladenosine-3'-phosphate
  modified_base 14: mod_base = OTHER; note = 2'-O-methyluridine-3'-phosphate
  modified_base 15: mod_base = OTHER; note = 2'-O-methyladenosine-3'-phosphate
  modified_base 16: mod_base = OTHER; note = 2'-O-methyluridine-3'-phosphate
  modified_base 17: mod_base = OTHER; note = 2'-O-methyluridine-3'-phosphate
  modified_base 18: mod_base = OTHER; note = 2'-O-methyluridine-3'-phosphate
  modified_base 19: mod_base = OTHER; note = 2'-O-methylguanosine-3'-phosphate
  modified_base 20: mod_base = OTHER; note = 2'-O-methylguanosine-3'-phosphate
  modified_base 21: mod_base = OTHER; note = 2'-O-methyluridine-3'-phosphate ((2S,4R)-1-[29-[[2-(acetylamino)-2-deoxy-beta-D-galactopyra nosyl]oxy]-14,14-bis[[3-[[3-[[5-[[2-(acetylamino)-2-deoxy-b eta-D-galactopyranosyl]oxy]-1-oxopentyl]amino]propyl]amino] -3-oxopropoxy]methyl]-1,12,19,25-tetraoxo-16-oxa-13,20,24-t riazanonacos-1-yl]-4-hydroxy-2-pyrrolidinyl)methyl ester
atgccttcgaggatatttggt

SEQ ID NO: 680 - RNA, 21 nt, synthetic construct
  source 1..21: mol_type = other RNA
  modified_base 1: mod_base = OTHER; note = 2'-O-methyluridine-3'-phosphorothioate
  modified_base 2: mod_base = OTHER; note = 2'-O-methylguanosine-3'-phosphorothioate
  modified_base 3: mod_base = OTHER; note = 2'-O-methylcytidine-3'-phosphate
  modified_base 4: mod_base = OTHER; note = 2'-O-methylcytidine-3'-phosphate
  modified_base 5: mod_base = OTHER; note = 2'-O-methyluridine-3'-phosphate
  modified_base 6: mod_base = OTHER; note = 2'-O-methyluridine-3'-phosphate
  modified_base 7: mod_base = OTHER; note = 2'-deoxy-2'-fluorocytidine-3'-phosphate
  modified_base 8: mod_base = OTHER; note = 2'-O-methylguanosine-3'-phosphate
  modified_base 9: mod_base = OTHER; note = 2'-deoxy-2'-fluoroadenosine-3'-phosphate
  modified_base 10: mod_base = OTHER; note = 2'-deoxy-2'-fluoroguanosine-3'-phosphate
  modified_base 11: mod_base = OTHER; note = 2'-deoxy-2'-fluoroguanosine-3'-phosphate
  modified_base 12: mod_base = OTHER; note = 2'-O-methyladenosine-3'-phosphate
  modified_base 13: mod_base = OTHER; note = 2'-O-methyluridine-3'-phosphate
  modified_base 14: mod_base = OTHER; note = 2'-O-methyladenosine-3'-phosphate
  modified_base 15: mod_base = OTHER; note = 2'-O-methyluridine-3'-phosphate
  modified_base 16: mod_base = OTHER; note = 2'-O-methyluridine-3'-phosphate
  modified_base 17: mod_base = OTHER; note = 2'-O-methyluridine-3'-phosphate
  modified_base 18: mod_base = OTHER; note = 2'-O-methylguanosine-3'-phosphate
  modified_base 19: mod_base = OTHER; note = 2'-O-methylguanosine-3'-phosphate
  modified_base 20: mod_base = OTHER; note = 2'-O-methyladenosine-3'-phosphate
  modified_base 21: mod_base = OTHER; note = 2'-O-methyluridine-3'-phosphate ((2S,4R)-1-[29-[[2-(acetylamino)-2-deoxy-beta-D-galactopyra nosyl]oxy]-14,14-bis[[3-[[3-[[5-[[2-(acetylamino)-2-deoxy-b eta-D-galactopyranosyl]oxy]-1-oxopentyl]amino]propyl]amino] -3-oxopropoxy]methyl]-1,12,19,25-tetraoxo-16-oxa-13,20,24-t riazanonacos-1-yl]-4-hydroxy-2-pyrrolidinyl)methyl ester
tgccttcgaggatatttggat

SEQ ID NO: 681 - RNA, 21 nt, synthetic construct
  source 1..21: mol_type = other RNA
  modified_base 1: mod_base = OTHER; note = 2'-O-methylcytidine-3'-phosphorothioate
  modified_base 2: mod_base = OTHER; note = 2'-O-methyladenosine-3'-phosphorothioate
  modified_base 3: mod_base = OTHER; note = 2'-O-methyluridine-3'-phosphate
  modified_base 4: mod_base = OTHER; note = 2'-O-methyluridine-3'-phosphate
  modified_base 5: mod_base = OTHER; note = 2'-O-methylcytidine-3'-phosphate
  modified_base 6: mod_base = OTHER; note = 2'-O-methyladenosine-3'-phosphate
  modified_base 7: mod_base = OTHER; note = 2'-deoxy-2'-fluoroguanosine-3'-phosphate
  modified_base 8: mod_base = OTHER; note = 2'-O-methylguanosine-3'-phosphate
  modified_base 9: mod_base = OTHER; note = 2'-deoxy-2'-fluorouridine-3'-phosphate
  modified_base 10: mod_base = OTHER; note = 2'-deoxy-2'-fluorouridine-3'-phosphate
  modified_base 11: mod_base = OTHER; note = 2'-deoxy-2'-fluorocytidine-3'-phosphate
  modified_base 12: mod_base = OTHER; note = 2'-O-methyluridine-3'-phosphate
  modified_base 13: mod_base = OTHER; note = 2'-O-methyluridine-3'-phosphate
  modified_base 14: mod_base = OTHER; note = 2'-O-methylguanosine-3'-phosphate
  modified_base 15: mod_base = OTHER; note = 2'-O-methylguanosine-3'-phosphate
  modified_base 16: mod_base = OTHER; note = 2'-O-methyladenosine-3'-phosphate
  modified_base 17: mod_base = OTHER; note = 2'-O-methyladenosine-3'-phosphate
  modified_base 18: mod_base = OTHER; note = 2'-O-methylguanosine-3'-phosphate
  modified_base 19: mod_base = OTHER; note = 2'-O-methyladenosine-3'-phosphate
  modified_base 20: mod_base = OTHER; note = 2'-O-methylguanosine-3'-phosphate
  modified_base 21: mod_base = OTHER; note = 2'-O-methyluridine-3'-phosphate ((2S,4R)-1-[29-[[2-(acetylamino)-2-deoxy-beta-D-galactopyra nosyl]oxy]-14,14-bis[[3-[[3-[[5-[[2-(acetylamino)-2-deoxy-b eta-D-galactopyranosyl]oxy]-1-oxopentyl]amino]propyl]amino] -3-oxopropoxy]methyl]-1,12,19,25-tetraoxo-16-oxa-13,20,24-t riazanonacos-1-yl]-4-hydroxy-2-pyrrolidinyl)methyl ester
cattcaggttcttggaagagt

SEQ ID NO: 682 - RNA, 21 nt, synthetic construct
  source 1..21: mol_type = other RNA
  modified_base 1: mod_base = OTHER; note = 2'-O-methyladenosine-3'-phosphorothioate
  modified_base 2: mod_base = OTHER; note = 2'-O-methylguanosine-3'-phosphorothioate
  modified_base 3: mod_base = OTHER; note = 2'-O-methylguanosine-3'-phosphate
  modified_base 4: mod_base = OTHER; note = 2'-O-methyluridine-3'-phosphate
  modified_base 5: mod_base = OTHER; note = 2'-O-methyluridine-3'-phosphate
  modified_base 6: mod_base = OTHER; note = 2'-O-methylcytidine-3'-phosphate
  modified_base 7: mod_base = OTHER; note = 2'-deoxy-2'-fluorouridine-3'-phosphate
  modified_base 8: mod_base = OTHER; note = 2'-O-methyluridine-3'-phosphate
  modified_base 9: mod_base = OTHER; note = 2'-deoxy-2'-fluoroguanosine-3'-phosphate
  modified_base 10: mod_base = OTHER; note = 2'-deoxy-2'-fluoroguanosine-3'-phosphate
  modified_base 11: mod_base = OTHER; note = 2'-deoxy-2'-fluoroadenosine-3'-phosphate
  modified_base 12: mod_base = OTHER; note = 2'-O-methyladenosine-3'-phosphate
  modified_base 13: mod_base = OTHER; note = 2'-O-methylguanosine-3'-phosphate
  modified_base 14: mod_base = OTHER; note = 2'-O-methyladenosine-3'-phosphate
  modified_base 15: mod_base = OTHER; note = 2'-O-methylguanosine-3'-phosphate
  modified_base 16: mod_base = OTHER; note = 2'-O-methyladenosine-3'-phosphate
  modified_base 17: mod_base = OTHER; note = 2'-O-methyladenosine-3'-phosphate
  modified_base 18: mod_base = OTHER; note = 2'-O-methylguanosine-3'-phosphate
  modified_base 19: mod_base = OTHER; note = 2'-O-methylguanosine-3'-phosphate
  modified_base 20: mod_base = OTHER; note = 2'-O-methylguanosine-3'-phosphate
  modified_base 21: mod_base = OTHER; note = 2'-O-methyluridine-3'-phosphate ((2S,4R)-1-[29-[[2-(acetylamino)-2-deoxy-beta-D-galactopyra nosyl]oxy]-14,14-bis[[3-[[3-[[5-[[2-(acetylamino)-2-deoxy-b eta-D-galactopyranosyl]oxy]-1-oxopentyl]amino]propyl]amino] -3-oxopropoxy]methyl]-1,12,19,25-tetraoxo-16-oxa-13,20,24-t riazanonacos-1-yl]-4-hydroxy-2-pyrrolidinyl)methyl ester
aggttcttggaagagaagggt

SEQ ID NO: 683 - RNA, 21 nt, synthetic construct
  source 1..21: mol_type = other RNA
  modified_base 1: mod_base = OTHER; note = 2'-O-methylguanosine-3'-phosphorothioate
  modified_base 2: mod_base = OTHER; note = 2'-O-methylguanosine-3'-phosphorothioate
  modified_base 3: mod_base = OTHER; note = 2'-O-methyluridine-3'-phosphate
  modified_base 4: mod_base = OTHER; note = 2'-O-methyluridine-3'-phosphate
  modified_base 5: mod_base = OTHER; note = 2'-O-methylcytidine-3'-phosphate
  modified_base 6: mod_base = OTHER; note = 2'-O-methyluridine-3'-phosphate
  modified_base 7: mod_base = OTHER; note = 2'-deoxy-2'-fluorouridine-3'-phosphate
  modified_base 8: mod_base = OTHER; note = 2'-O-methylguanosine-3'-phosphate
  modified_base 9: mod_base = OTHER; note = 2'-deoxy-2'-fluoroguanosine-3'-phosphate
  modified_base 10: mod_base = OTHER; note = 2'-deoxy-2'-fluoroadenosine-3'-phosphate
  modified_base 11: mod_base = OTHER; note = 2'-deoxy-2'-fluoroadenosine-3'-phosphate
  modified_base 12: mod_base = OTHER; note = 2'-O-methylguanosine-3'-phosphate
  modified_base 13: mod_base = OTHER; note = 2'-O-methyladenosine-3'-phosphate
  modified_base 14: mod_base = OTHER; note = 2'-O-methylguanosine-3'-phosphate
  modified_base 15: mod_base = OTHER; note = 2'-O-methyladenosine-3'-phosphate
  modified_base 16: mod_base = OTHER; note = 2'-O-methyladenosine-3'-phosphate
  modified_base 17: mod_base = OTHER; note = 2'-O-methylguanosine-3'-phosphate
  modified_base 18: mod_base = OTHER; note = 2'-O-methylguanosine-3'-phosphate
  modified_base 19: mod_base = OTHER; note = 2'-O-methylguanosine-3'-phosphate
  modified_base 20: mod_base = OTHER; note = 2'-O-methylcytidine-3'-phosphate
  modified_base 21: mod_base = OTHER; note = 2'-O-methyluridine-3'-phosphate ((2S,4R)-1-[29-[[2-(acetylamino)-2-deoxy-beta-D-galactopyra nosyl]oxy]-14,14-bis[[3-[[3-[[5-[[2-(acetylamino)-2-deoxy-b eta-D-galactopyranosyl]oxy]-1-oxopentyl]amino]propyl]amino] -3-oxopropoxy]methyl]-1,12,19,25-tetraoxo-16-oxa-13,20,24-t riazanonacos-1-yl]-4-hydroxy-2-pyrrolidinyl)methyl ester
ggttcttggaagagaagggct

SEQ ID NO: 684 - RNA, 21 nt, synthetic construct
  source 1..21: mol_type = other RNA
  modified_base 1: mod_base = OTHER; note = 2'-O-methylguanosine-3'-phosphorothioate
  modified_base 2: mod_base = OTHER; note = 2'-O-methyluridine-3'-phosphorothioate
  modified_base 3: mod_base = OTHER; note = 2'-O-methyluridine-3'-phosphate
  modified_base 4: mod_base = OTHER; note = 2'-O-methylcytidine-3'-phosphate
  modified_base 5: mod_base = OTHER; note = 2'-O-methyluridine-3'-phosphate
  modified_base 6: mod_base = OTHER; note = 2'-O-methyluridine-3'-phosphate
  modified_base 7: mod_base = OTHER; note = 2'-deoxy-2'-fluoroguanosine-3'-phosphate
  modified_base 8: mod_base = OTHER; note = 2'-O-methylguanosine-3'-phosphate
  modified_base 9: mod_base = OTHER; note = 2'-deoxy-2'-fluoroadenosine-3'-phosphate
  modified_base 10: mod_base = OTHER; note = 2'-deoxy-2'-fluoroadenosine-3'-phosphate
  modified_base 11: mod_base = OTHER; note = 2'-deoxy-2'-fluoroguanosine-3'-phosphate
  modified_base 12: mod_base = OTHER; note = 2'-O-methyladenosine-3'-phosphate
  modified_base 13: mod_base = OTHER; note = 2'-O-methylguanosine-3'-phosphate
  modified_base 14: mod_base = OTHER; note = 2'-O-methyladenosine-3'-phosphate
  modified_base 15: mod_base = OTHER; note = 2'-O-methyladenosine-3'-phosphate
  modified_base 16: mod_base = OTHER; note = 2'-O-methylguanosine-3'-phosphate
  modified_base 17: mod_base = OTHER; note = 2'-O-methylguanosine-3'-phosphate
  modified_base 18: mod_base = OTHER; note = 2'-O-methylguanosine-3'-phosphate
  modified_base 19: mod_base = OTHER; note = 2'-O-methylcytidine-3'-phosphate
  modified_base 20: mod_base = OTHER; note = 2'-O-methyladenosine-3'-phosphate
  modified_base 21: mod_base = OTHER; note = 2'-O-methyluridine-3'-phosphate ((2S,4R)-1-[29-[[2-(acetylamino)-2-deoxy-beta-D-galactopyra nosyl]oxy]-14,14-bis[[3-[[3-[[5-[[2-(acetylamino)-2-deoxy-b eta-D-galactopyranosyl]oxy]-1-oxopentyl]amino]propyl]amino] -3-oxopropoxy]methyl]-1,12,19,25-tetraoxo-16-oxa-13,20,24-t riazanonacos-1-yl]-4-hydroxy-2-pyrrolidinyl)methyl ester
gttcttggaagagaagggcat

SEQ ID NO: 685 - RNA, 21 nt, synthetic construct
  source 1..21: mol_type = other RNA
  modified_base 1: mod_base = OTHER; note = 2'-O-methyladenosine-3'-phosphorothioate
  modified_base 2: mod_base = OTHER; note = 2'-O-methyladenosine-3'-phosphorothioate
  modified_base 3: mod_base = OTHER; note = 2'-O-methylguanosine-3'-phosphate
  modified_base 4: mod_base = OTHER; note = 2'-O-methyladenosine-3'-phosphate
  modified_base 5: mod_base = OTHER; note = 2'-O-methylguanosine-3'-phosphate
  modified_base 6: mod_base = OTHER; note = 2'-O-methyladenosine-3'-phosphate
  modified_base 7: mod_base = OTHER; note = 2'-deoxy-2'-fluoroadenosine-3'-phosphate
  modified_base 8: mod_base = OTHER; note = 2'-O-methylguanosine-3'-phosphate
  modified_base 9: mod_base = OTHER; note = 2'-deoxy-2'-fluoroguanosine-3'-phosphate
  modified_base 10: mod_base = OTHER; note = 2'-deoxy-2'-fluoroguanosine-3'-phosphate
  modified_base 11: mod_base = OTHER; note = 2'-deoxy-2'-fluorocytidine-3'-phosphate
  modified_base 12: mod_base = OTHER; note = 2'-O-methyladenosine-3'-phosphate
  modified_base 13: mod_base = OTHER; note = 2'-O-methyluridine-3'-phosphate
  modified_base 14: mod_base = OTHER; note = 2'-O-methylcytidine-3'-phosphate
  modified_base 15: mod_base = OTHER; note = 2'-O-methyluridine-3'-phosphate
  modified_base 16: mod_base = OTHER; note = 2'-O-methylguanosine-3'-phosphate
  modified_base 17: mod_base = OTHER; note = 2'-O-methylcytidine-3'-phosphate
  modified_base 18: mod_base = OTHER; note = 2'-O-methyladenosine-3'-phosphate
  modified_base 19: mod_base = OTHER; note = 2'-O-methyladenosine-3'-phosphate
  modified_base 20: mod_base = OTHER; note = 2'-O-methylcytidine-3'-phosphate
  modified_base 21: mod_base = OTHER; note = 2'-O-methyluridine-3'-phosphate ((2S,4R)-1-[29-[[2-(acetylamino)-2-deoxy-beta-D-galactopyra nosyl]oxy]-14,14-bis[[3-[[3-[[5-[[2-(acetylamino)-2-deoxy-b eta-D-galactopyranosyl]oxy]-1-oxopentyl]amino]propyl]amino] -3-oxopropoxy]methyl]-1,12,19,25-tetraoxo-16-oxa-13,20,24-t riazanonacos-1-yl]-4-hydroxy-2-pyrrolidinyl)methyl ester
aagagaagggcatctgcaact

SEQ ID NO: 686 - RNA, 21 nt, synthetic construct
  source 1..21: mol_type = other RNA
  modified_base 1: mod_base = OTHER; note = 2'-O-methylguanosine-3'-phosphorothioate
  modified_base 2: mod_base = OTHER; note = 2'-O-methylcytidine-3'-phosphorothioate
  modified_base 3: mod_base = OTHER; note = 2'-O-methylcytidine-3'-phosphate
  modified_base 4: mod_base = OTHER; note = 2'-O-methyluridine-3'-phosphate
  modified_base 5: mod_base = OTHER; note = 2'-O-methylguanosine-3'-phosphate
  modified_base 6: mod_base = OTHER; note = 2'-O-methyladenosine-3'-phosphate
  modified_base 7: mod_base = OTHER; note = 2'-deoxy-2'-fluoroadenosine-3'-phosphate
  modified_base 8: mod_base = OTHER; note = 2'-O-methylguanosine-3'-phosphate
  modified_base 9: mod_base = OTHER; note = 2'-deoxy-2'-fluorouridine-3'-phosphate
  modified_base 10: mod_base = OTHER; note = 2'-deoxy-2'-fluorocytidine-3'-phosphate
  modified_base 11: mod_base = OTHER; note = 2'-deoxy-2'-fluoroadenosine-3'-phosphate
  modified_base 12: mod_base = OTHER; note = 2'-O-methyluridine-3'-phosphate
  modified_base 13: mod_base = OTHER; note = 2'-O-methylcytidine-3'-phosphate
  modified_base 14: mod_base = OTHER; note = 2'-O-methylcytidine-3'-phosphate
  modified_base 15: mod_base = OTHER; note = 2'-O-methyluridine-3'-phosphate
  modified_base 16: mod_base = OTHER; note = 2'-O-methylcytidine-3'-phosphate
  modified_base 17: mod_base = OTHER; note = 2'-O-methyladenosine-3'-phosphate
  modified_base 18: mod_base = OTHER; note = 2'-O-methylguanosine-3'-phosphate
  modified_base 19: mod_base = OTHER; note = 2'-O-methyladenosine-3'-phosphate
  modified_base 20: mod_base = OTHER; note = 2'-O-methyladenosine-3'-phosphate
  modified_base 21: mod_base = OTHER; note = 2'-O-methyluridine-3'-phosphate ((2S,4R)-1-[29-[[2-(acetylamino)-2-deoxy-beta-D-galactopyra nosyl]oxy]-14,14-bis[[3-[[3-[[5-[[2-(acetylamino)-2-deoxy-b eta-D-galactopyranosyl]oxy]-1-oxopentyl]amino]propyl]amino] -3-oxopropoxy]methyl]-1,12,19,25-tetraoxo-16-oxa-13,20,24-t riazanonacos-1-yl]-4-hydroxy-2-pyrrolidinyl)methyl ester
gcctgaagtcatcctcagaat

SEQ ID NO: 687 - RNA, 21 nt, synthetic construct
  source 1..21: mol_type = other RNA
  modified_base 1: mod_base = OTHER; note = 2'-O-methylcytidine-3'-phosphorothioate
  modified_base 2: mod_base = OTHER; note = 2'-O-methyluridine-3'-phosphorothioate
  modified_base 3: mod_base = OTHER; note = 2'-O-methylguanosine-3'-phosphate
  modified_base 4: mod_base = OTHER; note = 2'-O-methyladenosine-3'-phosphate
  modified_base 5: mod_base = OTHER; note = 2'-O-methyladenosine-3'-phosphate
  modified_base 6: mod_base = OTHER; note = 2'-O-methylguanosine-3'-phosphate
  modified_base 7: mod_base = OTHER; note = 2'-deoxy-2'-fluorouridine-3'-phosphate
  modified_base 8: mod_base = OTHER; note = 2'-O-methylcytidine-3'-phosphate
  modified_base 9: mod_base = OTHER; note = 2'-deoxy-2'-fluoroadenosine-3'-phosphate
  modified_base 10: mod_base = OTHER; note = 2'-deoxy-2'-fluorouridine-3'-phosphate
  modified_base 11: mod_base = OTHER; note = 2'-deoxy-2'-fluorocytidine-3'-phosphate
  modified_base 12: mod_base = OTHER; note = 2'-O-methylcytidine-3'-phosphate
  modified_base 13: mod_base = OTHER; note = 2'-O-methyluridine-3'-phosphate
  modified_base 14: mod_base = OTHER; note = 2'-O-methylcytidine-3'-phosphate
  modified_base 15: mod_base = OTHER; note = 2'-O-methyladenosine-3'-phosphate
  modified_base 16: mod_base = OTHER; note = 2'-O-methylguanosine-3'-phosphate
  modified_base 17: mod_base = OTHER; note = 2'-O-methyladenosine-3'-phosphate
  modified_base 18: mod_base = OTHER; note = 2'-O-methyladenosine-3'-phosphate
  modified_base 19: mod_base = OTHER; note = 2'-O-methylguanosine-3'-phosphate
  modified_base 20: mod_base = OTHER; note = 2'-O-methylguanosine-3'-phosphate
  modified_base 21: mod_base = OTHER; note = 2'-O-methyluridine-3'-phosphate ((2S,4R)-1-[29-[[2-(acetylamino)-2-deoxy-beta-D-galactopyra nosyl]oxy]-14,14-bis[[3-[[3-[[5-[[2-(acetylamino)-2-deoxy-b eta-D-galactopyranosyl]oxy]-1-oxopentyl]amino]propyl]amino] -3-oxopropoxy]methyl]-1,12,19,25-tetraoxo-16-oxa-13,20,24-t riazanonacos-1-yl]-4-hydroxy-2-pyrrolidinyl)methyl ester
ctgaagtcatcctcagaaggt

SEQ ID NO: 688 - RNA, 21 nt, synthetic construct
  source 1..21: mol_type = other RNA
  modified_base 1: mod_base = OTHER; note = 2'-O-methyluridine-3'-phosphorothioate
  modified_base 2: mod_base = OTHER; note = 2'-O-methylguanosine-3'-phosphorothioate
  modified_base 3: mod_base = OTHER; note = 2'-O-methyladenosine-3'-phosphate
  modified_base 4: mod_base = OTHER; note = 2'-O-methyladenosine-3'-phosphate
  modified_base 5: mod_base = OTHER; note = 2'-O-methylguanosine-3'-phosphate
  modified_base 6: mod_base = OTHER; note = 2'-O-methyluridine-3'-phosphate
  modified_base 7: mod_base = OTHER; note = 2'-deoxy-2'-fluorocytidine-3'-phosphate
  modified_base 8: mod_base = OTHER; note = 2'-O-methyladenosine-3'-phosphate
  modified_base 9: mod_base = OTHER; note = 2'-deoxy-2'-fluorouridine-3'-phosphate
  modified_base 10: mod_base = OTHER; note = 2'-deoxy-2'-fluorocytidine-3'-phosphate
  modified_base 11: mod_base = OTHER; note = 2'-deoxy-2'-fluorocytidine-3'-phosphate
  modified_base 12: mod_base = OTHER; note = 2'-O-methyluridine-3'-phosphate
  modified_base 13: mod_base = OTHER; note = 2'-O-methylcytidine-3'-phosphate
  modified_base 14: mod_base = OTHER; note = 2'-O-methyladenosine-3'-phosphate
  modified_base 15: mod_base = OTHER; note = 2'-O-methylguanosine-3'-phosphate
  modified_base 16: mod_base = OTHER; note = 2'-O-methyladenosine-3'-phosphate
  modified_base 17: mod_base = OTHER; note = 2'-O-methyladenosine-3'-phosphate
  modified_base 18: mod_base = OTHER; note = 2'-O-methylguanosine-3'-phosphate
  modified_base 19: mod_base = OTHER; note = 2'-O-methylguanosine-3'-phosphate
  modified_base 20: mod_base = OTHER; note = 2'-O-methylguanosine-3'-phosphate
  modified_base 21: mod_base = OTHER; note = 2'-O-methyluridine-3'-phosphate ((2S,4R)-1-[29-[[2-(acetylamino)-2-deoxy-beta-D-galactopyra nosyl]oxy]-14,14-bis[[3-[[3-[[5-[[2-(acetylamino)-2-deoxy-b eta-D-galactopyranosyl]oxy]-1-oxopentyl]amino]propyl]amino] -3-oxopropoxy]methyl]-1,12,19,25-tetraoxo-16-oxa-13,20,24-t riazanonacos-1-yl]-4-hydroxy-2-pyrrolidinyl)methyl ester
tgaagtcatcctcagaagggt

SEQ ID NO: 689 - RNA, 21 nt, synthetic construct
  source 1..21: mol_type = other RNA
  modified_base 1: mod_base = OTHER; note = 2'-O-methylguanosine-3'-phosphorothioate
  modified_base 2: mod_base = OTHER; note = 2'-O-methyladenosine-3'-phosphorothioate
  modified_base 3: mod_base = OTHER; note = 2'-O-methyladenosine-3'-phosphate
  modified_base 4: mod_base = OTHER; note = 2'-O-methylguanosine-3'-phosphate
  modified_base 5: mod_base = OTHER; note = 2'-O-methyluridine-3'-phosphate
  modified_base 6: mod_base = OTHER; note = 2'-O-methylcytidine-3'-phosphate
  modified_base 7: mod_base = OTHER; note = 2'-deoxy-2'-fluoroadenosine-3'-phosphate
  modified_base 8: mod_base = OTHER; note = 2'-O-methyluridine-3'-phosphate
  modified_base 9: mod_base = OTHER; note = 2'-deoxy-2'-fluorocytidine-3'-phosphate
  modified_base 10: mod_base = OTHER; note = 2'-deoxy-2'-fluorocytidine-3'-phosphate
  modified_base 11: mod_base = OTHER; note = 2'-deoxy-2'-fluorouridine-3'-phosphate
  modified_base 12: mod_base = OTHER; note = 2'-O-methylcytidine-3'-phosphate
  modified_base 13: mod_base = OTHER; note = 2'-O-methyladenosine-3'-phosphate
  modified_base 14: mod_base = OTHER; note = 2'-O-methylguanosine-3'-phosphate
  modified_base 15: mod_base = OTHER; note = 2'-O-methyladenosine-3'-phosphate
  modified_base 16: mod_base = OTHER; note = 2'-O-methyladenosine-3'-phosphate
  modified_base 17: mod_base = OTHER; note = 2'-O-methylguanosine-3'-phosphate
  modified_base 18: mod_base = OTHER; note = 2'-O-methylguanosine-3'-phosphate
  modified_base 19: mod_base = OTHER; note = 2'-O-methylguanosine-3'-phosphate
  modified_base 20: mod_base = OTHER; note = 2'-O-methyladenosine-3'-phosphate
  modified_base 21: mod_base = OTHER; note = 2'-O-methyluridine-3'-phosphate ((2S,4R)-1-[29-[[2-(acetylamino)-2-deoxy-beta-D-galactopyra nosyl]oxy]-14,14-bis[[3-[[3-[[5-[[2-(acetylamino)-2-deoxy-b eta-D-galactopyranosyl]oxy]-1-oxopentyl]amino]propyl]amino] -3-oxopropoxy]methyl]-1,12,19,25-tetraoxo-16-oxa-13,20,24-t riazanonacos-1-yl]-4-hydroxy-2-pyrrolidinyl)methyl ester
gaagtcatcctcagaagggat

SEQ ID NO: 690 - RNA, 21 nt, synthetic construct
  source 1..21: mol_type = other RNA
  modified_base 1: mod_base = OTHER; note = 2'-O-methyladenosine-3'-phosphorothioate
  modified_base 2: mod_base = OTHER; note = 2'-O-methyladenosine-3'-phosphorothioate
  modified_base 3: mod_base = OTHER; note = 2'-O-methylguanosine-3'-phosphate
  modified_base 4: mod_base = OTHER; note = 2'-O-methyluridine-3'-phosphate
  modified_base 5: mod_base = OTHER; note = 2'-O-methylcytidine-3'-phosphate
  modified_base 6: mod_base = OTHER; note = 2'-O-methyladenosine-3'-phosphate
  modified_base 7: mod_base = OTHER; note = 2'-deoxy-2'-fluorouridine-3'-phosphate
  modified_base 8: mod_base = OTHER; note = 2'-O-methylcytidine-3'-phosphate
  modified_base 9: mod_base = OTHER; note = 2'-deoxy-2'-fluorocytidine-3'-phosphate
  modified_base 10: mod_base = OTHER; note = 2'-deoxy-2'-fluorouridine-3'-phosphate
  modified_base 11: mod_base = OTHER; note = 2'-deoxy-2'-fluorocytidine-3'-phosphate
  modified_base 12: mod_base = OTHER; note = 2'-O-methyladenosine-3'-phosphate
  modified_base 13: mod_base = OTHER; note = 2'-O-methylguanosine-3'-phosphate
  modified_base 14: mod_base = OTHER; note = 2'-O-methyladenosine-3'-phosphate
  modified_base 15: mod_base = OTHER; note = 2'-O-methyladenosine-3'-phosphate
  modified_base 16: mod_base = OTHER; note = 2'-O-methylguanosine-3'-phosphate
  modified_base 17: mod_base = OTHER; note = 2'-O-methylguanosine-3'-phosphate
  modified_base 18: mod_base = OTHER; note = 2'-O-methylguanosine-3'-phosphate
  modified_base 19: mod_base = OTHER; note = 2'-O-methyladenosine-3'-phosphate
  modified_base 20: mod_base = OTHER; note = 2'-O-methyluridine-3'-phosphate
  modified_base 21: mod_base = OTHER; note = 2'-O-methyluridine-3'-phosphate ((2S,4R)-1-[29-[[2-(acetylamino)-2-deoxy-beta-D-galactopyra nosyl]oxy]-14,14-bis[[3-[[3-[[5-[[2-(acetylamino)-2-deoxy-b eta-D-galactopyranosyl]oxy]-1-oxopentyl]amino]propyl]amino] -3-oxopropoxy]methyl]-1,12,19,25-tetraoxo-16-oxa-13,20,24-t riazanonacos-1-yl]-4-hydroxy-2-pyrrolidinyl)methyl ester
aagtcatcctcagaagggatt

SEQ ID NO: 691 - RNA, 21 nt, synthetic construct
  source 1..21: mol_type = other RNA
  modified_base 1: mod_base = OTHER; note = 2'-O-methyladenosine-3'-phosphorothioate
  modified_base 2: mod_base = OTHER; note = 2'-O-methylguanosine-3'-phosphorothioate
  modified_base 3: mod_base = OTHER; note = 2'-O-methyluridine-3'-phosphate
  modified_base 4: mod_base = OTHER; note = 2'-O-methylcytidine-3'-phosphate
  modified_base 5: mod_base = OTHER; note = 2'-O-methyladenosine-3'-phosphate
  modified_base 6: mod_base = OTHER; note = 2'-O-methyluridine-3'-phosphate
  modified_base 7: mod_base = OTHER; note = 2'-deoxy-2'-fluorocytidine-3'-phosphate
  modified_base 8: mod_base = OTHER; note = 2'-O-methylcytidine-3'-phosphate
  modified_base 9: mod_base = OTHER; note = 2'-deoxy-2'-fluorouridine-3'-phosphate
  modified_base 10: mod_base = OTHER; note = 2'-deoxy-2'-fluorocytidine-3'-phosphate
  modified_base 11: mod_base = OTHER; note = 2'-deoxy-2'-fluoroadenosine-3'-phosphate
  modified_base 12: mod_base = OTHER; note = 2'-O-methylguanosine-3'-phosphate
  modified_base 13: mod_base = OTHER; note = 2'-O-methyladenosine-3'-phosphate
  modified_base 14: mod_base = OTHER; note = 2'-O-methyladenosine-3'-phosphate
  modified_base 15: mod_base = OTHER; note = 2'-O-methylguanosine-3'-phosphate
  modified_base 16: mod_base = OTHER; note = 2'-O-methylguanosine-3'-phosphate
  modified_base 17: mod_base = OTHER; note = 2'-O-methylguanosine-3'-phosphate
  modified_base 18: mod_base = OTHER; note = 2'-O-methyladenosine-3'-phosphate
  modified_base 19: mod_base = OTHER; note = 2'-O-methyluridine-3'-phosphate
  modified_base 20: mod_base = OTHER; note = 2'-O-methylguanosine-3'-phosphate
  modified_base 21: mod_base = OTHER; note = 2'-O-methyluridine-3'-phosphate ((2S,4R)-1-[29-[[2-(acetylamino)-2-deoxy-beta-D-galactopyra nosyl]oxy]-14,14-bis[[3-[[3-[[5-[[2-(acetylamino)-2-deoxy-b eta-D-galactopyranosyl]oxy]-1-oxopentyl]amino]propyl]amino] -3-oxopropoxy]methyl]-1,12,19,25-tetraoxo-16-oxa-13,20,24-t riazanonacos-1-yl]-4-hydroxy-2-pyrrolidinyl)methyl ester
agtcatcctcagaagggatgt

SEQ ID NO: 692 - RNA, 21 nt, synthetic construct
  source 1..21: mol_type = other RNA
  modified_base 1: mod_base = OTHER; note = 2'-O-methyluridine-3'-phosphorothioate
  modified_base 2: mod_base = OTHER; note = 2'-O-methylcytidine-3'-phosphorothioate
  modified_base 3: mod_base = OTHER; note = 2'-O-methyladenosine-3'-phosphate
  modified_base 4: mod_base = OTHER; note = 2'-O-methyluridine-3'-phosphate
  modified_base 5: mod_base = OTHER; note = 2'-O-methylcytidine-3'-phosphate
  modified_base 6: mod_base = OTHER; note = 2'-O-methylcytidine-3'-phosphate
  modified_base 7: mod_base = OTHER; note = 2'-deoxy-2'-fluorouridine-3'-phosphate
  modified_base 8: mod_base = OTHER; note = 2'-O-methylcytidine-3'-phosphate
  modified_base 9: mod_base = OTHER; note = 2'-deoxy-2'-fluoroadenosine-3'-phosphate
  modified_base 10: mod_base = OTHER; note = 2'-deoxy-2'-fluoroguanosine-3'-phosphate
  modified_base 11: mod_base = OTHER; note = 2'-deoxy-2'-fluoroadenosine-3'-phosphate
  modified_base 12: mod_base = OTHER; note = 2'-O-methyladenosine-3'-phosphate
  modified_base 13: mod_base = OTHER; note = 2'-O-methylguanosine-3'-phosphate
  modified_base 14: mod_base = OTHER; note = 2'-O-methylguanosine-3'-phosphate
  modified_base 15: mod_base = OTHER; note = 2'-O-methylguanosine-3'-phosphate
  modified_base 16: mod_base = OTHER; note = 2'-O-methyladenosine-3'-phosphate
  modified_base 17: mod_base = OTHER; note = 2'-O-methyluridine-3'-phosphate
  modified_base 18: mod_base = OTHER; note = 2'-O-methylguanosine-3'-phosphate
  modified_base 19: mod_base = OTHER; note = 2'-O-methylguanosine-3'-phosphate
  modified_base 20: mod_base = OTHER; note = 2'-O-methyladenosine-3'-phosphate
  modified_base 21: mod_base = OTHER; note = 2'-O-methyluridine-3'-phosphate ((2S,4R)-1-[29-[[2-(acetylamino)-2-deoxy-beta-D-galactopyra nosyl]oxy]-14,14-bis[[3-[[3-[[5-[[2-(acetylamino)-2-deoxy-b eta-D-galactopyranosyl]oxy]-1-oxopentyl]amino]propyl]amino] -3-oxopropoxy]methyl]-1,12,19,25-tetraoxo-16-oxa-13,20,24-t riazanonacos-1-yl]-4-hydroxy-2-pyrrolidinyl)methyl ester
tcatcctcagaagggatggat

SEQ ID NO: 693 - RNA, 21 nt, synthetic construct
  source 1..21: mol_type = other RNA
  modified_base 1: mod_base = OTHER; note = 2'-O-methylguanosine-3'-phosphorothioate
  modified_base 2: mod_base = OTHER; note = 2'-O-methylguanosine-3'-phosphorothioate
  modified_base 3: mod_base = OTHER; note = 2'-O-methylguanosine-3'-phosphate
  modified_base 4: mod_base = OTHER; note = 2'-O-methyladenosine-3'-phosphate
  modified_base 5: mod_base = OTHER; note = 2'-O-methylguanosine-3'-phosphate
  modified_base 6: mod_base = OTHER; note = 2'-O-methyladenosine-3'-phosphate
  modified_base 7: mod_base = OTHER; note = 2'-deoxy-2'-fluorouridine-3'-phosphate
  modified_base 8: mod_base = OTHER; note = 2'-O-methylguanosine-3'-phosphate
  modified_base 9: mod_base = OTHER; note = 2'-deoxy-2'-fluoroadenosine-3'-phosphate
  modified_base 10: mod_base = OTHER; note = 2'-deoxy-2'-fluoroguanosine-3'-phosphate
  modified_base 11: mod_base = OTHER; note = 2'-deoxy-2'-fluorocytidine-3'-phosphate
  modified_base 12: mod_base = OTHER; note = 2'-O-methyluridine-3'-phosphate
  modified_base 13: mod_base = OTHER; note = 2'-O-methylguanosine-3'-phosphate
  modified_base 14: mod_base = OTHER; note = 2'-O-methylcytidine-3'-phosphate
  modified_base 15: mod_base = OTHER; note = 2'-O-methyluridine-3'-phosphate
  modified_base 16: mod_base = OTHER; note = 2'-O-methyladenosine-3'-phosphate
  modified_base 17: mod_base = OTHER; note = 2'-O-methylguanosine-3'-phosphate
  modified_base 18: mod_base = OTHER; note = 2'-O-methyladenosine-3'-phosphate
  modified_base 19: mod_base = OTHER; note = 2'-O-methylcytidine-3'-phosphate
  modified_base 20: mod_base = OTHER; note = 2'-O-methylcytidine-3'-phosphate
  modified_base 21: mod_base = OTHER; note = 2'-O-methyluridine-3'-phosphate ((2S,4R)-1-[29-[[2-(acetylamino)-2-deoxy-beta-D-galactopyra nosyl]oxy]-14,14-bis[[3-[[3-[[5-[[2-(acetylamino)-2-deoxy-b eta-D-galactopyranosyl]oxy]-1-oxopentyl]amino]propyl]amino] -3-oxopropoxy]methyl]-1,12,19,25-tetraoxo-16-oxa-13,20,24-t riazanonacos-1-yl]-4-hydroxy-2-pyrrolidinyl)methyl ester
gggagatgagctgctagacct

SEQ ID NO: 694 - RNA, 21 nt, synthetic construct
  source 1..21: mol_type = other RNA
  modified_base 1: mod_base = OTHER; note = 2'-O-methylguanosine-3'-phosphorothioate
  modified_base 2: mod_base = OTHER; note = 2'-O-methylguanosine-3'-phosphorothioate
  modified_base 3: mod_base = OTHER; note = 2'-O-methyladenosine-3'-phosphate
  modified_base 4: mod_base = OTHER; note = 2'-O-methylguanosine-3'-phosphate
  modified_base 5: mod_base = OTHER; note = 2'-O-methyladenosine-3'-phosphate
  modified_base 6: mod_base = OTHER; note = 2'-O-methyluridine-3'-phosphate
  modified_base 7: mod_base = OTHER; note = 2'-deoxy-2'-fluoroguanosine-3'-phosphate
  modified_base 8: mod_base = OTHER; note = 2'-O-methyladenosine-3'-phosphate
  modified_base 9: mod_base = OTHER; note = 2'-deoxy-2'-fluoroguanosine-3'-phosphate
  modified_base 10: mod_base = OTHER; note = 2'-deoxy-2'-fluorocytidine-3'-phosphate
  modified_base 11: mod_base = OTHER; note = 2'-deoxy-2'-fluorouridine-3'-phosphate
  modified_base 12: mod_base = OTHER; note = 2'-O-methylguanosine-3'-phosphate
  modified_base 13: mod_base = OTHER; note = 2'-O-methylcytidine-3'-phosphate
  modified_base 14: mod_base = OTHER; note = 2'-O-methyluridine-3'-phosphate
  modified_base 15: mod_base = OTHER; note = 2'-O-methyladenosine-3'-phosphate
  modified_base 16: mod_base = OTHER; note = 2'-O-methylguanosine-3'-phosphate
  modified_base 17: mod_base = OTHER; note = 2'-O-methyladenosine-3'-phosphate
  modified_base 18: mod_base = OTHER; note = 2'-O-methylcytidine-3'-phosphate
  modified_base 19: mod_base = OTHER; note = 2'-O-methylcytidine-3'-phosphate
  modified_base 20: mod_base = OTHER; note = 2'-O-methyladenosine-3'-phosphate
  modified_base 21: mod_base = OTHER; note = 2'-O-methyluridine-3'-phosphate ((2S,4R)-1-[29-[[2-(acetylamino)-2-deoxy-beta-D-galactopyra nosyl]oxy]-14,14-bis[[3-[[3-[[5-[[2-(acetylamino)-2-deoxy-b eta-D-galactopyranosyl]oxy]-1-oxopentyl]amino]propyl]amino] -3-oxopropoxy]methyl]-1,12,19,25-tetraoxo-16-oxa-13,20,24-t riazanonacos-1-yl]-4-hydroxy-2-pyrrolidinyl)methyl ester
ggagatgagctgctagaccat

SEQ ID NO: 695 - RNA, 21 nt, synthetic construct
  source 1..21: mol_type = other RNA
  modified_base 1: mod_base = OTHER; note = 2'-O-methyladenosine-3'-phosphorothioate
  modified_base 2: mod_base = OTHER; note = 2'-O-methylguanosine-3'-phosphorothioate
  modified_base 3: mod_base = OTHER; note = 2'-O-methyladenosine-3'-phosphate
  modified_base 4: mod_base = OTHER; note = 2'-O-methyluridine-3'-phosphate
  modified_base 5: mod_base = OTHER; note = 2'-O-methylguanosine-3'-phosphate
  modified_base 6: mod_base = OTHER; note = 2'-O-methyladenosine-3'-phosphate
  modified_base 7: mod_base = OTHER; note = 2'-deoxy-2'-fluoroguanosine-3'-phosphate
  modified_base 8: mod_base = OTHER; note = 2'-O-methylcytidine-3'-phosphate
  modified_base 9: mod_base = OTHER; note = 2'-deoxy-2'-fluorouridine-3'-phosphate
  modified_base 10: mod_base = OTHER; note = 2'-deoxy-2'-fluoroguanosine-3'-phosphate
  modified_base 11: mod_base = OTHER; note = 2'-deoxy-2'-fluorocytidine-3'-phosphate
  modified_base 12: mod_base = OTHER; note = 2'-O-methyluridine-3'-phosphate
  modified_base 13: mod_base = OTHER; note = 2'-O-methyladenosine-3'-phosphate
  modified_base 14: mod_base = OTHER; note = 2'-O-methylguanosine-3'-phosphate
  modified_base 15: mod_base = OTHER; note = 2'-O-methyladenosine-3'-phosphate
  modified_base 16: mod_base = OTHER; note = 2'-O-methylcytidine-3'-phosphate
  modified_base 17: mod_base = OTHER; note = 2'-O-methylcytidine-3'-phosphate
  modified_base 18: mod_base = OTHER; note = 2'-O-methyladenosine-3'-phosphate
  modified_base 19: mod_base = OTHER; note = 2'-O-methylcytidine-3'-phosphate
  modified_base 20: mod_base = OTHER; note = 2'-O-methylcytidine-3'-phosphate
  modified_base 21: mod_base = OTHER; note = 2'-O-methyluridine-3'-phosphate ((2S,4R)-1-[29-[[2-(acetylamino)-2-deoxy-beta-D-galactopyra nosyl]oxy]-14,14-bis[[3-[[3-[[5-[[2-(acetylamino)-2-deoxy-b eta-D-galactopyranosyl]oxy]-1-oxopentyl]amino]propyl]amino] -3-oxopropoxy]methyl]-1,12,19,25-tetraoxo-16-oxa-13,20,24-t riazanonacos-1-yl]-4-hydroxy-2-pyrrolidinyl)methyl ester
agatgagctgctagaccacct

SEQ ID NO: 696 - RNA, 21 nt, synthetic construct
  source 1..21: mol_type = other RNA
  modified_base 1: mod_base = OTHER; note = 2'-O-methylcytidine-3'-phosphorothioate
  modified_base 2: mod_base = OTHER; note = 2'-O-methyluridine-3'-phosphorothioate
  modified_base 3: mod_base = OTHER; note = 2'-O-methylguanosine-3'-phosphate
  modified_base 4: mod_base = OTHER; note = 2'-O-methylcytidine-3'-phosphate
  modified_base 5: mod_base = OTHER; note = 2'-O-methyluridine-3'-phosphate
  modified_base 6: mod_base = OTHER; note = 2'-O-methyladenosine-3'-phosphate
  modified_base 7: mod_base = OTHER; note = 2'-deoxy-2'-fluoroguanosine-3'-phosphate
  modified_base 8: mod_base = OTHER; note = 2'-O-methyladenosine-3'-phosphate
  modified_base 9: mod_base = OTHER; note = 2'-deoxy-2'-fluorocytidine-3'-phosphate
  modified_base 10: mod_base = OTHER; note = 2'-deoxy-2'-fluorocytidine-3'-phosphate
  modified_base 11: mod_base = OTHER; note = 2'-deoxy-2'-fluoroadenosine-3'-phosphate
  modified_base 12: mod_base = OTHER; note = 2'-O-methylcytidine-3'-phosphate
  modified_base 13: mod_base = OTHER; note = 2'-O-methylcytidine-3'-phosphate
  modified_base 14: mod_base = OTHER; note = 2'-O-methyluridine-3'-phosphate
  modified_base 15: mod_base = OTHER; note = 2'-O-methylguanosine-3'-phosphate
  modified_base 16: mod_base = OTHER; note = 2'-O-methylcytidine-3'-phosphate
  modified_base 17: mod_base = OTHER; note = 2'-O-methylguanosine-3'-phosphate
  modified_base 18: mod_base = OTHER; note = 2'-O-methyluridine-3'-phosphate
  modified_base 19: mod_base = OTHER; note = 2'-O-methylcytidine-3'-phosphate
  modified_base 20: mod_base = OTHER; note = 2'-O-methyluridine-3'-phosphate
  modified_base 21: mod_base = OTHER; note = 2'-O-methyluridine-3'-phosphate ((2S,4R)-1-[29-[[2-(acetylamino)-2-deoxy-beta-D-galactopyra nosyl]oxy]-14,14-bis[[3-[[3-[[5-[[2-(acetylamino)-2-deoxy-b eta-D-galactopyranosyl]oxy]-1-oxopentyl]amino]propyl]amino] -3-oxopropoxy]methyl]-1,12,19,25-tetraoxo-16-oxa-13,20,24-t riazanonacos-1-yl]-4-hydroxy-2-pyrrolidinyl)methyl ester
ctgctagaccacctgcgtctt

SEQ ID NO: 697 - RNA, 21 nt, synthetic construct
  source 1..21: mol_type = other RNA
  modified_base 1: mod_base = OTHER; note = 2'-O-methylcytidine-3'-phosphorothioate
  modified_base 2: mod_base = OTHER; note = 2'-O-methyluridine-3'-phosphorothioate
  modified_base 3: mod_base = OTHER; note = 2'-O-methyladenosine-3'-phosphate
  modified_base 4: mod_base = OTHER; note = 2'-O-methylguanosine-3'-phosphate
  modified_base 5: mod_base = OTHER; note = 2'-O-methyladenosine-3'-phosphate
  modified_base 6: mod_base = OTHER; note = 2'-O-methylcytidine-3'-phosphate
  modified_base 7: mod_base = OTHER; note = 2'-deoxy-2'-fluorocytidine-3'-phosphate
  modified_base 8: mod_base = OTHER; note = 2'-O-methyladenosine-3'-phosphate
  modified_base 9: mod_base = OTHER; note = 2'-deoxy-2'-fluorocytidine-3'-phosphate
  modified_base 10: mod_base = OTHER; note = 2'-deoxy-2'-fluorocytidine-3'-phosphate
  modified_base 11: mod_base = OTHER; note = 2'-deoxy-2'-fluorouridine-3'-phosphate
  modified_base 12: mod_base = OTHER; note = 2'-O-methylguanosine-3'-phosphate
  modified_base 13: mod_base = OTHER; note = 2'-O-methylcytidine-3'-phosphate
  modified_base 14: mod_base = OTHER; note = 2'-O-methylguanosine-3'-phosphate
  modified_base 15: mod_base = OTHER; note = 2'-O-methyluridine-3'-phosphate
  modified_base 16: mod_base = OTHER; note = 2'-O-methylcytidine-3'-phosphate
  modified_base 17: mod_base = OTHER; note = 2'-O-methyluridine-3'-phosphate
  modified_base 18: mod_base = OTHER; note = 2'-O-methylcytidine-3'-phosphate
  modified_base 19: mod_base = OTHER; note = 2'-O-methyladenosine-3'-phosphate
  modified_base 20: mod_base = OTHER; note = 2'-O-methylguanosine-3'-phosphate
  modified_base 21: mod_base = OTHER; note = 2'-O-methyluridine-3'-phosphate ((2S,4R)-1-[29-[[2-(acetylamino)-2-deoxy-beta-D-galactopyra nosyl]oxy]-14,14-bis[[3-[[3-[[5-[[2-(acetylamino)-2-deoxy-b eta-D-galactopyranosyl]oxy]-1-oxopentyl]amino]propyl]amino] -3-oxopropoxy]methyl]-1,12,19,25-tetraoxo-16-oxa-13,20,24-t riazanonacos-1-yl]-4-hydroxy-2-pyrrolidinyl)methyl ester
ctagaccacctgcgtctcagt

SEQ ID NO: 698 - RNA, 21 nt, synthetic construct
  source 1..21: mol_type = other RNA
  modified_base 1: mod_base = OTHER; note = 2'-O-methyladenosine-3'-phosphorothioate
  modified_base 2: mod_base = OTHER; note = 2'-O-methylcytidine-3'-phosphorothioate
  modified_base 3: mod_base = OTHER; note = 2'-O-methylcytidine-3'-phosphate
  modified_base 4: mod_base = OTHER; note = 2'-O-methyladenosine-3'-phosphate
  modified_base 5: mod_base = OTHER; note = 2'-O-methylcytidine-3'-phosphate
  modified_base 6: mod_base = OTHER; note = 2'-O-methylcytidine-3'-phosphate
  modified_base 7: mod_base = OTHER; note = 2'-deoxy-2'-fluorouridine-3'-phosphate
  modified_base 8: mod_base = OTHER; note = 2'-O-methylguanosine-3'-phosphate
  modified_base 9: mod_base = OTHER; note = 2'-deoxy-2'-fluorocytidine-3'-phosphate
  modified_base 10: mod_base = OTHER; note = 2'-deoxy-2'-fluoroguanosine-3'-phosphate
  modified_base 11: mod_base = OTHER; note = 2'-deoxy-2'-fluorouridine-3'-phosphate
  modified_base 12: mod_base = OTHER; note = 2'-O-methylcytidine-3'-phosphate
  modified_base 13: mod_base = OTHER; note = 2'-O-methyluridine-3'-phosphate
  modified_base 14: mod_base = OTHER; note = 2'-O-methylcytidine-3'-phosphate
  modified_base 15: mod_base = OTHER; note = 2'-O-methyladenosine-3'-phosphate
  modified_base 16: mod_base = OTHER; note = 2'-O-methylguanosine-3'-phosphate
  modified_base 17: mod_base = OTHER; note = 2'-O-methylcytidine-3'-phosphate
  modified_base 18: mod_base = OTHER; note = 2'-O-methyladenosine-3'-phosphate
  modified_base 19: mod_base = OTHER; note = 2'-O-methyluridine-3'-phosphate
  modified_base 20: mod_base = OTHER; note = 2'-O-methylcytidine-3'-phosphate
  modified_base 21: mod_base = OTHER; note = 2'-O-methyluridine-3'-phosphate ((2S,4R)-1-[29-[[2-(acetylamino)-2-deoxy-beta-D-galactopyra nosyl]oxy]-14,14-bis[[3-[[3-[[5-[[2-(acetylamino)-2-deoxy-b eta-D-galactopyranosyl]oxy]-1-oxopentyl]amino]propyl]amino] -3-oxopropoxy]methyl]-1,12,19,25-tetraoxo-16-oxa-13,20,24-t riazanonacos-1-yl]-4-hydroxy-2-pyrrolidinyl)methyl ester
accacctgcgtctcagcatct

SEQ ID NO: 699 - RNA, 21 nt, synthetic construct
  source 1..21: mol_type = other RNA
  modified_base 1: mod_base = OTHER; note = 2'-O-methylguanosine-3'-phosphorothioate
  modified_base 2: mod_base = OTHER; note = 2'-O-methylcytidine-3'-phosphorothioate
  modified_base 3: mod_base = OTHER; note = 2'-O-methylguanosine-3'-phosphate
  modified_base 4: mod_base = OTHER; note = 2'-O-methyluridine-3'-phosphate
  modified_base 5: mod_base = OTHER; note = 2'-O-methylcytidine-3'-phosphate
  modified_base 6: mod_base = OTHER; note = 2'-O-methyluridine-3'-phosphate
  modified_base 7: mod_base = OTHER; note = 2'-deoxy-2'-fluorocytidine-3'-phosphate
  modified_base 8: mod_base = OTHER; note = 2'-O-methyladenosine-3'-phosphate
  modified_base 9: mod_base = OTHER; note = 2'-deoxy-2'-fluoroguanosine-3'-phosphate
  modified_base 10: mod_base = OTHER; note = 2'-deoxy-2'-fluorocytidine-3'-phosphate
  modified_base 11: mod_base = OTHER; note = 2'-deoxy-2'-fluoroadenosine-3'-phosphate
  modified_base 12: mod_base = OTHER; note = 2'-O-methyluridine-3'-phosphate
  modified_base 13: mod_base = OTHER; note = 2'-O-methylcytidine-3'-phosphate
  modified_base 14: mod_base = OTHER; note = 2'-O-methylcytidine-3'-phosphate
  modified_base 15: mod_base = OTHER; note = 2'-O-methyluridine-3'-phosphate
  modified_base 16: mod_base = OTHER; note = 2'-O-methylguanosine-3'-phosphate
  modified_base 17: mod_base = OTHER; note = 2'-O-methylcytidine-3'-phosphate
  modified_base 18: mod_base = OTHER; note = 2'-O-methylcytidine-3'-phosphate
  modified_base 19: mod_base = OTHER; note = 2'-O-methylcytidine-3'-phosphate
  modified_base 20: mod_base = OTHER; note = 2'-O-methyluridine-3'-phosphate
  modified_base 21: mod_base = OTHER; note = 2'-O-methyluridine-3'-phosphate ((2S,4R)-1-[29-[[2-(acetylamino)-2-deoxy-beta-D-galactopyra nosyl]oxy]-14,14-bis[[3-[[3-[[5-[[2-(acetylamino)-2-deoxy-b eta-D-galactopyranosyl]oxy]-1-oxopentyl]amino]propyl]amino] -3-oxopropoxy]methyl]-1,12,19,25-tetraoxo-16-oxa-13,20,24-t riazanonacos-1-yl]-4-hydroxy-2-pyrrolidinyl)methyl ester
gcgtctcagcatcctgccctt

SEQ ID NO: 700 - RNA, 21 nt, synthetic construct
  source 1..21: mol_type = other RNA
  modified_base 1: mod_base = OTHER; note = 2'-O-methylguanosine-3'-phosphorothioate
  modified_base 2: mod_base = OTHER; note = 2'-O-methylcytidine-3'-phosphorothioate
  modified_base 3: mod_base = OTHER; note = 2'-O-methyladenosine-3'-phosphate
  modified_base 4: mod_base = OTHER; note = 2'-O-methyluridine-3'-phosphate
  modified_base 5: mod_base = OTHER; note = 2'-O-methylcytidine-3'-phosphate
  modified_base 6: mod_base = OTHER; note = 2'-O-methylcytidine-3'-phosphate
  modified_base 7: mod_base = OTHER; note = 2'-deoxy-2'-fluorouridine-3'-phosphate
  modified_base 8: mod_base = OTHER; note = 2'-O-methylguanosine-3'-phosphate
  modified_base 9: mod_base = OTHER; note = 2'-deoxy-2'-fluorocytidine-3'-phosphate
  modified_base 10: mod_base = OTHER; note = 2'-deoxy-2'-fluorocytidine-3'-phosphate
  modified_base 11: mod_base = OTHER; note = 2'-deoxy-2'-fluorocytidine-3'-phosphate
  modified_base 12: mod_base = OTHER; note = 2'-O-methyluridine-3'-phosphate
  modified_base 13: mod_base = OTHER; note = 2'-O-methylguanosine-3'-phosphate
  modified_base 14: mod_base = OTHER; note = 2'-O-methylguanosine-3'-phosphate
  modified_base 15: mod_base = OTHER; note = 2'-O-methylguanosine-3'-phosphate
  modified_base 16: mod_base = OTHER; note = 2'-O-methyladenosine-3'-phosphate
  modified_base 17: mod_base = OTHER; note = 2'-O-methyluridine-3'-phosphate
  modified_base 18: mod_base = OTHER; note = 2'-O-methylguanosine-3'-phosphate
  modified_base 19: mod_base = OTHER; note = 2'-O-methyladenosine-3'-phosphate
  modified_base 20: mod_base = OTHER; note = 2'-O-methylguanosine-3'-phosphate
  modified_base 21: mod_base = OTHER; note = 2'-O-methyluridine-3'-phosphate ((2S,4R)-1-[29-[[2-(acetylamino)-2-deoxy-beta-D-galactopyra nosyl]oxy]-14,14-bis[[3-[[3-[[5-[[2-(acetylamino)-2-deoxy-b eta-D-galactopyranosyl]oxy]-1-oxopentyl]amino]propyl]amino] -3-oxopropoxy]methyl]-1,12,19,25-tetraoxo-16-oxa-13,20,24-t riazanonacos-1-yl]-4-hydroxy-2-pyrrolidinyl)methyl ester
gcatcctgccctgggatgagt

SEQ ID NO: 701 - RNA, 21 nt, synthetic construct
  source 1..21: mol_type = other RNA
  modified_base 1: mod_base = OTHER; note = 2'-O-methylcytidine-3'-phosphorothioate
  modified_base 2: mod_base = OTHER; note = 2'-O-methyladenosine-3'-phosphorothioate
  modified_base 3: mod_base = OTHER; note = 2'-O-methyluridine-3'-phosphate
  modified_base 4: mod_base = OTHER; note = 2'-O-methylcytidine-3'-phosphate
  modified_base 5: mod_base = OTHER; note = 2'-O-methylcytidine-3'-phosphate
  modified_base 6: mod_base = OTHER; note = 2'-O-methyluridine-3'-phosphate
  modified_base 7: mod_base = OTHER; note = 2'-deoxy-2'-fluoroguanosine-3'-phosphate
  modified_base 8: mod_base = OTHER; note = 2'-O-methylcytidine-3'-phosphate
  modified_base 9: mod_base = OTHER; note = 2'-deoxy-2'-fluorocytidine-3'-phosphate
  modified_base 10: mod_base = OTHER; note = 2'-deoxy-2'-fluorocytidine-3'-phosphate
  modified_base 11: mod_base = OTHER; note = 2'-deoxy-2'-fluorouridine-3'-phosphate
  modified_base 12: mod_base = OTHER; note = 2'-O-methylguanosine-3'-phosphate
  modified_base 13: mod_base = OTHER; note = 2'-O-methylguanosine-3'-phosphate
  modified_base 14: mod_base = OTHER; note = 2'-O-methylguanosine-3'-phosphate
  modified_base 15: mod_base = OTHER; note = 2'-O-methyladenosine-3'-phosphate
  modified_base 16: mod_base = OTHER; note = 2'-O-methyluridine-3'-phosphate
  modified_base 17: mod_base = OTHER; note = 2'-O-methylguanosine-3'-phosphate
  modified_base 18: mod_base = OTHER; note = 2'-O-methyladenosine-3'-phosphate
  modified_base 19: mod_base = OTHER; note = 2'-O-methylguanosine-3'-phosphate
  modified_base 20: mod_base = OTHER; note = 2'-O-methyladenosine-3'-phosphate
  modified_base 21: mod_base = OTHER; note = 2'-O-methyluridine-3'-phosphate ((2S,4R)-1-[29-[[2-(acetylamino)-2-deoxy-beta-D-galactopyra nosyl]oxy]-14,14-bis[[3-[[3-[[5-[[2-(acetylamino)-2-deoxy-b eta-D-galactopyranosyl]oxy]-1-oxopentyl]amino]propyl]amino] -3-oxopropoxy]methyl]-1,12,19,25-tetraoxo-16-oxa-13,20,24-t riazanonacos-1-yl]-4-hydroxy-2-pyrrolidinyl)methyl ester
catcctgccctgggatgagat

SEQ ID NO: 702 - RNA, 21 nt, synthetic construct
  source 1..21: mol_type = other RNA
  modified_base 1: mod_base = OTHER; note = 2'-O-methyladenosine-3'-phosphorothioate
  modified_base 2: mod_base = OTHER; note = 2'-O-methyluridine-3'-phosphorothioate
  modified_base 3: mod_base = OTHER; note = 2'-O-methylcytidine-3'-phosphate
  modified_base 4: mod_base = OTHER; note = 2'-O-methylcytidine-3'-phosphate
  modified_base 5: mod_base = OTHER; note = 2'-O-methyluridine-3'-phosphate
  modified_base 6: mod_base = OTHER; note = 2'-O-methylguanosine-3'-phosphate
  modified_base 7: mod_base = OTHER; note = 2'-deoxy-2'-fluorocytidine-3'-phosphate
  modified_base 8: mod_base = OTHER; note = 2'-O-methylcytidine-3'-phosphate
  modified_base 9: mod_base = OTHER; note = 2'-deoxy-2'-fluorocytidine-3'-phosphate
  modified_base 10: mod_base = OTHER; note = 2'-deoxy-2'-fluorouridine-3'-phosphate
  modified_base 11: mod_base = OTHER; note = 2'-deoxy-2'-fluoroguanosine-3'-phosphate
  modified_base 12: mod_base = OTHER; note = 2'-O-methylguanosine-3'-phosphate
  modified_base 13: mod_base = OTHER; note = 2'-O-methylguanosine-3'-phosphate
  modified_base 14: mod_base = OTHER; note = 2'-O-methyladenosine-3'-phosphate
  modified_base 15: mod_base = OTHER; note = 2'-O-methyluridine-3'-phosphate
  modified_base 16: mod_base = OTHER; note = 2'-O-methylguanosine-3'-phosphate
  modified_base 17: mod_base = OTHER; note = 2'-O-methyladenosine-3'-phosphate
  modified_base 18: mod_base = OTHER; note = 2'-O-methylguanosine-3'-phosphate
  modified_base 19: mod_base = OTHER; note = 2'-O-methyladenosine-3'-phosphate
  modified_base 20: mod_base = OTHER; note = 2'-O-methylguanosine-3'-phosphate
  modified_base 21: mod_base = OTHER; note = 2'-O-methyluridine-3'-phosphate ((2S,4R)-1-[29-[[2-(acetylamino)-2-deoxy-beta-D-galactopyra nosyl]oxy]-14,14-bis[[3-[[3-[[5-[[2-(acetylamino)-2-deoxy-b eta-D-galactopyranosyl]oxy]-1-oxopentyl]amino]propyl]amino] -3-oxopropoxy]methyl]-1,12,19,25-tetraoxo-16-oxa-13,20,24-t riazanonacos-1-yl]-4-hydroxy-2-pyrrolidinyl)methyl ester
atcctgccctgggatgagagt

SEQ ID NO: 703 - RNA, 21 nt, synthetic construct
  source 1..21: mol_type = other RNA
  modified_base 1: mod_base = OTHER; note = 2'-O-methyluridine-3'-phosphorothioate
  modified_base 2: mod_base = OTHER; note = 2'-O-methylguanosine-3'-phosphorothioate
  modified_base 3: mod_base = OTHER; note = 2'-O-methylcytidine-3'-phosphate
  modified_base 4: mod_base = OTHER; note = 2'-O-methylcytidine-3'-phosphate
  modified_base 5: mod_base = OTHER; note = 2'-O-methylcytidine-3'-phosphate
  modified_base 6: mod_base = OTHER; note = 2'-O-methyluridine-3'-phosphate
  modified_base 7: mod_base = OTHER; note = 2'-deoxy-2'-fluoroguanosine-3'-phosphate
  modified_base 8: mod_base = OTHER; note = 2'-O-methylguanosine-3'-phosphate
  modified_base 9: mod_base = OTHER; note = 2'-deoxy-2'-fluoroguanosine-3'-phosphate
  modified_base 10: mod_base = OTHER; note = 2'-deoxy-2'-fluoroadenosine-3'-phosphate
  modified_base 11: mod_base = OTHER; note = 2'-deoxy-2'-fluorouridine-3'-phosphate
  modified_base 12: mod_base = OTHER; note = 2'-O-methylguanosine-3'-phosphate
  modified_base 13: mod_base = OTHER; note = 2'-O-methyladenosine-3'-phosphate
  modified_base 14: mod_base = OTHER; note = 2'-O-methylguanosine-3'-phosphate
  modified_base 15: mod_base = OTHER; note = 2'-O-methyladenosine-3'-phosphate
  modified_base 16: mod_base = OTHER; note = 2'-O-methylguanosine-3'-phosphate
  modified_base 17: mod_base = OTHER; note = 2'-O-methylcytidine-3'-phosphate
  modified_base 18: mod_base = OTHER; note = 2'-O-methyladenosine-3'-phosphate
  modified_base 19: mod_base = OTHER; note = 2'-O-methyluridine-3'-phosphate
  modified_base 20: mod_base = OTHER; note = 2'-O-methylcytidine-3'-phosphate
  modified_base 21: mod_base = OTHER; note = 2'-O-methyluridine-3'-phosphate ((2S,4R)-1-[29-[[2-(acetylamino)-2-deoxy-beta-D-galactopyra nosyl]oxy]-14,14-bis[[3-[[3-[[5-[[2-(acetylamino)-2-deoxy-b eta-D-galactopyranosyl]oxy]-1-oxopentyl]amino]propyl]amino] -3-oxopropoxy]methyl]-1,12,19,25-tetraoxo-16-oxa-13,20,24-t riazanonacos-1-yl]-4-hydroxy-2-pyrrolidinyl)methyl ester
tgccctgggatgagagcatct

SEQ ID NO: 704 - RNA, 21 nt, synthetic construct
  source 1..21: mol_type = other RNA
  modified_base 1: mod_base = OTHER; note = 2'-O-methylcytidine-3'-phosphorothioate
  modified_base 2: mod_base = OTHER; note = 2'-O-methylcytidine-3'-phosphorothioate
  modified_base 3: mod_base = OTHER; note = 2'-O-methyluridine-3'-phosphate
  modified_base 4: mod_base = OTHER; note = 2'-O-methylguanosine-3'-phosphate
  modified_base 5: mod_base = OTHER; note = 2'-O-methylguanosine-3'-phosphate
  modified_base 6: mod_base = OTHER; note = 2'-O-methylguanosine-3'-phosphate
  modified_base 7: mod_base = OTHER; note = 2'-deoxy-2'-fluoroadenosine-3'-phosphate
  modified_base 8: mod_base = OTHER; note = 2'-O-methyluridine-3'-phosphate
  modified_base 9: mod_base = OTHER; note = 2'-deoxy-2'-fluoroguanosine-3'-phosphate
  modified_base 10: mod_base = OTHER; note = 2'-deoxy-2'-fluoroadenosine-3'-phosphate
  modified_base 11: mod_base = OTHER; note = 2'-deoxy-2'-fluoroguanosine-3'-phosphate
  modified_base 12: mod_base = OTHER; note = 2'-O-methyladenosine-3'-phosphate
  modified_base 13: mod_base = OTHER; note = 2'-O-methylguanosine-3'-phosphate
  modified_base 14: mod_base = OTHER; note = 2'-O-methylcytidine-3'-phosphate
  modified_base 15: mod_base = OTHER; note = 2'-O-methyladenosine-3'-phosphate
  modified_base 16: mod_base = OTHER; note = 2'-O-methyluridine-3'-phosphate
  modified_base 17: mod_base = OTHER; note = 2'-O-methylcytidine-3'-phosphate
  modified_base 18: mod_base = OTHER; note = 2'-O-methylcytidine-3'-phosphate
  modified_base 19: mod_base = OTHER; note = 2'-O-methyluridine-3'-phosphate
  modified_base 20: mod_base = OTHER; note = 2'-O-methylguanosine-3'-phosphate
  modified_base 21: mod_base = OTHER; note = 2'-O-methyluridine-3'-phosphate ((2S,4R)-1-[29-[[2-(acetylamino)-2-deoxy-beta-D-galactopyra nosyl]oxy]-14,14-bis[[3-[[3-[[5-[[2-(acetylamino)-2-deoxy-b eta-D-galactopyranosyl]oxy]-1-oxopentyl]amino]propyl]amino] -3-oxopropoxy]methyl]-1,12,19,25-tetraoxo-16-oxa-13,20,24-t riazanonacos-1-yl]-4-hydroxy-2-pyrrolidinyl)methyl ester
cctgggatgagagcatcctgt

SEQ ID NO: 705 - RNA, 21 nt, synthetic construct
  source 1..21: mol_type = other RNA
  modified_base 1: mod_base = OTHER; note = 2'-O-methyladenosine-3'-phosphorothioate
  modified_base 2: mod_base = OTHER; note = 2'-O-methyladenosine-3'-phosphorothioate
  modified_base 3: mod_base = OTHER; note = 2'-O-methyluridine-3'-phosphate
  modified_base 4: mod_base = OTHER; note = 2'-O-methylguanosine-3'-phosphate
  modified_base 5: mod_base = OTHER; note = 2'-O-methyladenosine-3'-phosphate
  modified_base 6: mod_base = OTHER; note = 2'-O-methyladenosine-3'-phosphate
  modified_base 7: mod_base = OTHER; note = 2'-deoxy-2'-fluoroadenosine-3'-phosphate
  modified_base 8: mod_base = OTHER; note = 2'-O-methylguanosine-3'-phosphate
  modified_base 9: mod_base = OTHER; note = 2'-deoxy-2'-fluoroadenosine-3'-phosphate
  modified_base 10: mod_base = OTHER; note = 2'-deoxy-2'-fluorocytidine-3'-phosphate
  modified_base 11: mod_base = OTHER; note = 2'-deoxy-2'-fluoroadenosine-3'-phosphate
  modified_base 12: mod_base = OTHER; note = 2'-O-methyladenosine-3'-phosphate
  modified_base 13: mod_base = OTHER; note = 2'-O-methyladenosine-3'-phosphate
  modified_base 14: mod_base = OTHER; note = 2'-O-methylguanosine-3'-phosphate
  modified_base 15: mod_base = OTHER; note = 2'-O-methylguanosine-3'-phosphate
  modified_base 16: mod_base = OTHER; note = 2'-O-methyluridine-3'-phosphate
  modified_base 17: mod_base = OTHER; note = 2'-O-methylguanosine-3'-phosphate
  modified_base 18: mod_base = OTHER; note = 2'-O-methylguanosine-3'-phosphate
  modified_base 19: mod_base = OTHER; note = 2'-O-methyladenosine-3'-phosphate
  modified_base 20: mod_base = OTHER; note = 2'-O-methyluridine-3'-phosphate
  modified_base 21: mod_base = OTHER; note = 2'-O-methyluridine-3'-phosphate ((2S,4R)-1-[29-[[2-(acetylamino)-2-deoxy-beta-D-galactopyra nosyl]oxy]-14,14-bis[[3-[[3-[[5-[[2-(acetylamino)-2-deoxy-b eta-D-galactopyranosyl]oxy]-1-oxopentyl]amino]propyl]amino] -3-oxopropoxy]methyl]-1,12,19,25-tetraoxo-16-oxa-13,20,24-t riazanonacos-1-yl]-4-hydroxy-2-pyrrolidinyl)methyl ester
aatgaaagacaaaggtggatt

SEQ ID NO: 706 - RNA, 21 nt, synthetic construct
  source 1..21: mol_type = other RNA
  modified_base 1: mod_base = OTHER; note = 2'-O-methyladenosine-3'-phosphorothioate
  modified_base 2: mod_base = OTHER; note = 2'-O-methyluridine-3'-phosphorothioate
  modified_base 3: mod_base = OTHER; note = 2'-O-methylguanosine-3'-phosphate
  modified_base 4: mod_base = OTHER; note = 2'-O-methyladenosine-3'-phosphate
  modified_base 5: mod_base = OTHER; note = 2'-O-methyladenosine-3'-phosphate
  modified_base 6: mod_base = OTHER; note = 2'-O-methyladenosine-3'-phosphate
  modified_base 7: mod_base = OTHER; note = 2'-deoxy-2'-fluoroguanosine-3'-phosphate
  modified_base 8: mod_base = OTHER; note = 2'-O-methyladenosine-3'-phosphate
  modified_base 9: mod_base = OTHER; note = 2'-deoxy-2'-fluorocytidine-3'-phosphate
  modified_base 10: mod_base = OTHER; note = 2'-deoxy-2'-fluoroadenosine-3'-phosphate
  modified_base 11: mod_base = OTHER; note = 2'-deoxy-2'-fluoroadenosine-3'-phosphate
  modified_base 12: mod_base = OTHER; note = 2'-O-methyladenosine-3'-phosphate
  modified_base 13: mod_base = OTHER; note = 2'-O-methylguanosine-3'-phosphate
  modified_base 14: mod_base = OTHER; note = 2'-O-methylguanosine-3'-phosphate
  modified_base 15: mod_base = OTHER; note = 2'-O-methyluridine-3'-phosphate
  modified_base 16: mod_base = OTHER; note = 2'-O-methylguanosine-3'-phosphate
  modified_base 17: mod_base = OTHER; note = 2'-O-methylguanosine-3'-phosphate
  modified_base 18: mod_base = OTHER; note = 2'-O-methyladenosine-3'-phosphate
  modified_base 19: mod_base = OTHER; note = 2'-O-methyluridine-3'-phosphate
  modified_base 20: mod_base = OTHER; note = 2'-O-methyladenosine-3'-phosphate
  modified_base 21: mod_base = OTHER; note = 2'-O-methyluridine-3'-phosphate ((2S,4R)-1-[29-[[2-(acetylamino)-2-deoxy-beta-D-galactopyra nosyl]oxy]-14,14-bis[[3-[[3-[[5-[[2-(acetylamino)-2-deoxy-b eta-D-galactopyranosyl]oxy]-1-oxopentyl]amino]propyl]amino] -3-oxopropoxy]methyl]-1,12,19,25-tetraoxo-16-oxa-13,20,24-t riazanonacos-1-yl]-4-hydroxy-2-pyrrolidinyl)methyl ester
atgaaagacaaaggtggatat

SEQ ID NO: 707 - RNA, 21 nt, synthetic construct
  source 1..21: mol_type = other RNA
  modified_base 1: mod_base = OTHER; note = 2'-O-methyladenosine-3'-phosphorothioate
  modified_base 2: mod_base = OTHER; note = 2'-O-methylguanosine-3'-phosphorothioate
  modified_base 3: mod_base = OTHER; note = 2'-O-methyladenosine-3'-phosphate
  modified_base 4: mod_base = OTHER; note = 2'-O-methylcytidine-3'-phosphate
  modified_base 5: mod_base = OTHER; note = 2'-O-methyladenosine-3'-phosphate
  modified_base 6: mod_base = OTHER; note = 2'-O-methyladenosine-3'-phosphate
  modified_base 7: mod_base = OTHER; note = 2'-deoxy-2'-fluoroadenosine-3'-phosphate
  modified_base 8: mod_base = OTHER; note = 2'-O-methylguanosine-3'-phosphate
  modified_base 9: mod_base = OTHER; note = 2'-deoxy-2'-fluoroguanosine-3'-phosphate
  modified_base 10: mod_base = OTHER; note = 2'-deoxy-2'-fluorouridine-3'-phosphate
  modified_base 11: mod_base = OTHER; note = 2'-deoxy-2'-fluoroguanosine-3'-phosphate
  modified_base 12: mod_base = OTHER; note = 2'-O-methylguanosine-3'-phosphate
  modified_base 13: mod_base = OTHER; note = 2'-O-methyladenosine-3'-phosphate
  modified_base 14: mod_base = OTHER; note = 2'-O-methyluridine-3'-phosphate
  modified_base 15: mod_base = OTHER; note = 2'-O-methyladenosine-3'-phosphate
  modified_base 16: mod_base = OTHER; note = 2'-O-methylcytidine-3'-phosphate
  modified_base 17: mod_base = OTHER; note = 2'-O-methyladenosine-3'-phosphate
  modified_base 18: mod_base = OTHER; note = 2'-O-methyluridine-3'-phosphate
  modified_base 19: mod_base = OTHER; note = 2'-O-methylguanosine-3'-phosphate
  modified_base 20: mod_base = OTHER; note = 2'-O-methyladenosine-3'-phosphate
  modified_base 21: mod_base = OTHER; note = 2'-O-methyluridine-3'-phosphate ((2S,4R)-1-[29-[[2-(acetylamino)-2-deoxy-beta-D-galactopyra nosyl]oxy]-14,14-bis[[3-[[3-[[5-[[2-(acetylamino)-2-deoxy-b eta-D-galactopyranosyl]oxy]-1-oxopentyl]amino]propyl]amino] -3-oxopropoxy]methyl]-1,12,19,25-tetraoxo-16-oxa-13,20,24-t riazanonacos-1-yl]-4-hydroxy-2-pyrrolidinyl)methyl ester
agacaaaggtggatacatgat

SEQ ID NO: 708 - RNA, 21 nt, synthetic construct
  source 1..21: mol_type = other RNA
  modified_base 1: mod_base = OTHER; note = 2'-O-methyladenosine-3'-phosphorothioate
  modified_base 2: mod_base = OTHER; note = 2'-O-methylcytidine-3'-phosphorothioate
  modified_base 3: mod_base = OTHER; note = 2'-O-methyladenosine-3'-phosphate
  modified_base 4: mod_base = OTHER; note = 2'-O-methyladenosine-3'-phosphate
  modified_base 5: mod_base = OTHER; note = 2'-O-methyladenosine-3'-phosphate
  modified_base 6: mod_base = OTHER; note = 2'-O-methylguanosine-3'-phosphate
  modified_base 7: mod_base = OTHER; note = 2'-deoxy-2'-fluoroguanosine-3'-phosphate
  modified_base 8: mod_base = OTHER; note = 2'-O-methyluridine-3'-phosphate
  modified_base 9: mod_base = OTHER; note = 2'-deoxy-2'-fluoroguanosine-3'-phosphate
  modified_base 10: mod_base = OTHER; note = 2'-deoxy-2'-fluoroguanosine-3'-phosphate
  modified_base 11: mod_base = OTHER; note = 2'-deoxy-2'-fluoroadenosine-3'-phosphate
  modified_base 12: mod_base = OTHER; note = 2'-O-methyluridine-3'-phosphate
  modified_base 13: mod_base = OTHER; note = 2'-O-methyladenosine-3'-phosphate
  modified_base 14: mod_base = OTHER; note = 2'-O-methylcytidine-3'-phosphate
  modified_base 15: mod_base = OTHER; note = 2'-O-methyladenosine-3'-phosphate
  modified_base 16: mod_base = OTHER; note = 2'-O-methyluridine-3'-phosphate
  modified_base 17: mod_base = OTHER; note = 2'-O-methylguanosine-3'-phosphate
  modified_base 18: mod_base = OTHER; note = 2'-O-methyladenosine-3'-phosphate
  modified_base 19: mod_base = OTHER; note = 2'-O-methylguanosine-3'-phosphate
  modified_base 20: mod_base = OTHER; note = 2'-O-methylcytidine-3'-phosphate
  modified_base 21: mod_base = OTHER; note = 2'-O-methyluridine-3'-phosphate ((2S,4R)-1-[29-[[2-(acetylamino)-2-deoxy-beta-D-galactopyra nosyl]oxy]-14,14-bis[[3-[[3-[[5-[[2-(acetylamino)-2-deoxy-b eta-D-galactopyranosyl]oxy]-1-oxopentyl]amino]propyl]amino] -3-oxopropoxy]methyl]-1,12,19,25-tetraoxo-16-oxa-13,20,24-t riazanonacos-1-yl]-4-hydroxy-2-pyrrolidinyl)methyl ester
acaaaggtggatacatgagct

SEQ ID NO: 709 - RNA, 21 nt, synthetic construct
  source 1..21: mol_type = other RNA
  modified_base 1: mod_base = OTHER; note = 2'-O-methylcytidine-3'-phosphorothioate
  modified_base 2: mod_base = OTHER; note = 2'-O-methyladenosine-3'-phosphorothioate
  modified_base 3: mod_base = OTHER; note = 2'-O-methyladenosine-3'-phosphate
  modified_base 4: mod_base = OTHER; note = 2'-O-methyladenosine-3'-phosphate
  modified_base 5: mod_base = OTHER; note = 2'-O-methylguanosine-3'-phosphate
  modified_base 6: mod_base = OTHER; note = 2'-O-methylguanosine-3'-phosphate
  modified_base 7: mod_base = OTHER; note = 2'-deoxy-2'-fluorouridine-3'-phosphate
  modified_base 8: mod_base = OTHER; note = 2'-O-methylguanosine-3'-phosphate
  modified_base 9: mod_base = OTHER; note = 2'-deoxy-2'-fluoroguanosine-3'-phosphate
  modified_base 10: mod_base = OTHER; note = 2'-deoxy-2'-fluoroadenosine-3'-phosphate
  modified_base 11: mod_base = OTHER; note = 2'-deoxy-2'-fluorouridine-3'-phosphate
  modified_base 12: mod_base = OTHER; note = 2'-O-methyladenosine-3'-phosphate
  modified_base 13: mod_base = OTHER; note = 2'-O-methylcytidine-3'-phosphate
  modified_base 14: mod_base = OTHER; note = 2'-O-methyladenosine-3'-phosphate
  modified_base 15: mod_base = OTHER; note = 2'-O-methyluridine-3'-phosphate
  modified_base 16: mod_base = OTHER; note = 2'-O-methylguanosine-3'-phosphate
  modified_base 17: mod_base = OTHER; note = 2'-O-methyladenosine-3'-phosphate
  modified_base 18: mod_base = OTHER; note = 2'-O-methylguanosine-3'-phosphate
  modified_base 19: mod_base = OTHER; note = 2'-O-methylcytidine-3'-phosphate
  modified_base 20: mod_base = OTHER; note = 2'-O-methyladenosine-3'-phosphate
  modified_base 21: mod_base = OTHER; note = 2'-O-methyluridine-3'-phosphate ((2S,4R)-1-[29-[[2-(acetylamino)-2-deoxy-beta-D-galactopyra nosyl]oxy]-14,14-bis[[3-[[3-[[5-[[2-(acetylamino)-2-deoxy-b eta-D-galactopyranosyl]oxy]-1-oxopentyl]amino]propyl]amino] -3-oxopropoxy]methyl]-1,12,19,25-tetraoxo-16-oxa-13,20,24-t riazanonacos-1-yl]-4-hydroxy-2-pyrrolidinyl)methyl ester
caaaggtggatacatgagcat

SEQ ID NO: 710 - RNA, 21 nt, synthetic construct
  source 1..21: mol_type = other RNA
  modified_base 1: mod_base = OTHER; note = 2'-O-methyladenosine-3'-phosphorothioate
  modified_base 2: mod_base = OTHER; note = 2'-O-methyladenosine-3'-phosphorothioate
  modified_base 3: mod_base = OTHER; note = 2'-O-methylguanosine-3'-phosphate
  modified_base 4: mod_base = OTHER; note = 2'-O-methylguanosine-3'-phosphate
  modified_base 5: mod_base = OTHER; note = 2'-O-methyluridine-3'-phosphate
  modified_base 6: mod_base = OTHER; note = 2'-O-methylguanosine-3'-phosphate
  modified_base 7: mod_base = OTHER; note = 2'-deoxy-2'-fluoroguanosine-3'-phosphate
  modified_base 8: mod_base = OTHER; note = 2'-O-methyladenosine-3'-phosphate
  modified_base 9: mod_base = OTHER; note = 2'-deoxy-2'-fluorouridine-3'-phosphate
  modified_base 10: mod_base = OTHER; note = 2'-deoxy-2'-fluoroadenosine-3'-phosphate
  modified_base 11: mod_base = OTHER; note = 2'-deoxy-2'-fluorocytidine-3'-phosphate
  modified_base 12: mod_base = OTHER; note = 2'-O-methyladenosine-3'-phosphate
  modified_base 13: mod_base = OTHER; note = 2'-O-methyluridine-3'-phosphate
  modified_base 14: mod_base = OTHER; note = 2'-O-methylguanosine-3'-phosphate
  modified_base 15: mod_base = OTHER; note = 2'-O-methyladenosine-3'-phosphate
  modified_base 16: mod_base = OTHER; note = 2'-O-methylguanosine-3'-phosphate
  modified_base 17: mod_base = OTHER; note = 2'-O-methylcytidine-3'-phosphate
  modified_base 18: mod_base = OTHER; note = 2'-O-methyladenosine-3'-phosphate
  modified_base 19: mod_base = OTHER; note = 2'-O-methyladenosine-3'-phosphate
  modified_base 20: mod_base = OTHER; note = 2'-O-methylguanosine-3'-phosphate
  modified_base 21: mod_base = OTHER; note = 2'-O-methyluridine-3'-phosphate ((2S,4R)-1-[29-[[2-(acetylamino)-2-deoxy-beta-D-galactopyra nosyl]oxy]-14,14-bis[[3-[[3-[[5-[[2-(acetylamino)-2-deoxy-b eta-D-galactopyranosyl]oxy]-1-oxopentyl]amino]propyl]amino] -3-oxopropoxy]methyl]-1,12,19,25-tetraoxo-16-oxa-13,20,24-t riazanonacos-1-yl]-4-hydroxy-2-pyrrolidinyl)methyl ester
aaggtggatacatgagcaagt

SEQ ID NO: 711 - RNA, 21 nt, synthetic construct
  source 1..21: mol_type = other RNA
  modified_base 1: mod_base = OTHER; note = 2'-O-methylguanosine-3'-phosphorothioate
  modified_base 2: mod_base = OTHER; note = 2'-O-methylguanosine-3'-phosphorothioate
  modified_base 3: mod_base = OTHER; note = 2'-O-methyladenosine-3'-phosphate
  modified_base 4: mod_base = OTHER; note = 2'-O-methyluridine-3'-phosphate
  modified_base 5: mod_base = OTHER; note = 2'-O-methyladenosine-3'-phosphate
  modified_base 6: mod_base = OTHER; note = 2'-O-methylcytidine-3'-phosphate
  modified_base 7: mod_base = OTHER; note = 2'-deoxy-2'-fluoroadenosine-3'-phosphate
  modified_base 8: mod_base = OTHER; note = 2'-O-methyluridine-3'-phosphate
  modified_base 9: mod_base = OTHER; note = 2'-deoxy-2'-fluoroguanosine-3'-phosphate
  modified_base 10: mod_base = OTHER; note = 2'-deoxy-2'-fluoroadenosine-3'-phosphate
  modified_base 11: mod_base = OTHER; note = 2'-deoxy-2'-fluoroguanosine-3'-phosphate
  modified_base 12: mod_base = OTHER; note = 2'-O-methylcytidine-3'-phosphate
  modified_base 13: mod_base = OTHER; note = 2'-O-methyladenosine-3'-phosphate
  modified_base 14: mod_base = OTHER; note = 2'-O-methyladenosine-3'-phosphate
  modified_base 15: mod_base = OTHER; note = 2'-O-methylguanosine-3'-phosphate
  modified_base 16: mod_base = OTHER; note = 2'-O-methyladenosine-3'-phosphate
  modified_base 17: mod_base = OTHER; note = 2'-O-methyluridine-3'-phosphate
  modified_base 18: mod_base = OTHER; note = 2'-O-methyluridine-3'-phosphate
  modified_base 19: mod_base = OTHER; note = 2'-O-methyluridine-3'-phosphate
  modified_base 20: mod_base = OTHER; note = 2'-O-methylguanosine-3'-phosphate
  modified_base 21: mod_base = OTHER; note = 2'-O-methyluridine-3'-phosphate ((2S,4R)-1-[29-[[2-(acetylamino)-2-deoxy-beta-D-galactopyra nosyl]oxy]-14,14-bis[[3-[[3-[[5-[[2-(acetylamino)-2-deoxy-b eta-D-galactopyranosyl]oxy]-1-oxopentyl]amino]propyl]amino] -3-oxopropoxy]methyl]-1,12,19,25-tetraoxo-16-oxa-13,20,24-t riazanonacos-1-yl]-4-hydroxy-2-pyrrolidinyl)methyl ester
ggatacatgagcaagatttgt

SEQ ID NO: 712 - RNA, 21 nt, synthetic construct
  source 1..21: mol_type = other RNA
  modified_base 1: mod_base = OTHER; note = 2'-O-methylguanosine-3'-phosphorothioate
  modified_base 2: mod_base = OTHER; note = 2'-O-methyladenosine-3'-phosphorothioate
  modified_base 3: mod_base = OTHER; note = 2'-O-methyluridine-3'-phosphate
  modified_base 4: mod_base = OTHER; note = 2'-O-methyladenosine-3'-phosphate
  modified_base 5: mod_base = OTHER; note = 2'-O-methylcytidine-3'-phosphate
  modified_base 6: mod_base = OTHER; note = 2'-O-methyladenosine-3'-phosphate
  modified_base 7: mod_base = OTHER; note = 2'-deoxy-2'-fluorouridine-3'-phosphate
  modified_base 8: mod_base = OTHER; note = 2'-O-methylguanosine-3'-phosphate
  modified_base 9: mod_base = OTHER; note = 2'-deoxy-2'-fluoroadenosine-3'-phosphate
  modified_base 10: mod_base = OTHER; note = 2'-deoxy-2'-fluoroguanosine-3'-phosphate
  modified_base 11: mod_base = OTHER; note = 2'-deoxy-2'-fluorocytidine-3'-phosphate
  modified_base 12: mod_base = OTHER; note = 2'-O-methyladenosine-3'-phosphate
  modified_base 13: mod_base = OTHER; note = 2'-O-methyladenosine-3'-phosphate
  modified_base 14: mod_base = OTHER; note = 2'-O-methylguanosine-3'-phosphate
  modified_base 15: mod_base = OTHER; note = 2'-O-methyladenosine-3'-phosphate
  modified_base 16: mod_base = OTHER; note = 2'-O-methyluridine-3'-phosphate
  modified_base 17: mod_base = OTHER; note = 2'-O-methyluridine-3'-phosphate
  modified_base 18: mod_base = OTHER; note = 2'-O-methyluridine-3'-phosphate
  modified_base 19: mod_base = OTHER; note = 2'-O-methylguanosine-3'-phosphate
  modified_base 20: mod_base = OTHER; note = 2'-O-methylcytidine-3'-phosphate
  modified_base 21: mod_base = OTHER; note = 2'-O-methyluridine-3'-phosphate ((2S,4R)-1-[29-[[2-(acetylamino)-2-deoxy-beta-D-galactopyra nosyl]oxy]-14,14-bis[[3-[[3-[[5-[[2-(acetylamino)-2-deoxy-b eta-D-galactopyranosyl]oxy]-1-oxopentyl]amino]propyl]amino] -3-oxopropoxy]methyl]-1,12,19,25-tetraoxo-16-oxa-13,20,24-t riazanonacos-1-yl]-4-hydroxy-2-pyrrolidinyl)methyl ester
gatacatgagcaagatttgct

SEQ ID NO: 713 - RNA, 21 nt, synthetic construct
  source 1..21: mol_type = other RNA
  modified_base 1: mod_base = OTHER; note = 2'-O-methyladenosine-3'-phosphorothioate
  modified_base 2: mod_base = OTHER; note = 2'-O-methyluridine-3'-phosphorothioate
  modified_base 3: mod_base = OTHER; note = 2'-O-methyladenosine-3'-phosphate
  modified_base 4: mod_base = OTHER; note = 2'-O-methylcytidine-3'-phosphate
  modified_base 5: mod_base = OTHER; note = 2'-O-methyladenosine-3'-phosphate
  modified_base 6: mod_base = OTHER; note = 2'-O-methyluridine-3'-phosphate
  modified_base 7: mod_base = OTHER; note = 2'-deoxy-2'-fluoroguanosine-3'-phosphate
  modified_base 8: mod_base = OTHER; note = 2'-O-methyladenosine-3'-phosphate
  modified_base 9: mod_base = OTHER; note = 2'-deoxy-2'-fluoroguanosine-3'-phosphate
  modified_base 10: mod_base = OTHER; note = 2'-deoxy-2'-fluorocytidine-3'-phosphate
  modified_base 11: mod_base = OTHER; note = 2'-deoxy-2'-fluoroadenosine-3'-phosphate
  modified_base 12: mod_base = OTHER; note = 2'-O-methyladenosine-3'-phosphate
  modified_base 13: mod_base = OTHER; note = 2'-O-methylguanosine-3'-phosphate
  modified_base 14: mod_base = OTHER; note = 2'-O-methyladenosine-3'-phosphate
  modified_base 15: mod_base = OTHER; note = 2'-O-methyluridine-3'-phosphate
  modified_base 16: mod_base = OTHER; note = 2'-O-methyluridine-3'-phosphate
  modified_base 17: mod_base = OTHER; note = 2'-O-methyluridine-3'-phosphate
  modified_base 18: mod_base = OTHER; note = 2'-O-methylguanosine-3'-phosphate
  modified_base 19: mod_base = OTHER; note = 2'-O-methylcytidine-3'-phosphate
  modified_base 20: mod_base = OTHER; note = 2'-O-methyladenosine-3'-phosphate
  modified_base 21: mod_base = OTHER; note = 2'-O-methyluridine-3'-phosphate ((2S,4R)-1-[29-[[2-(acetylamino)-2-deoxy-beta-D-galactopyra nosyl]oxy]-14,14-bis[[3-[[3-[[5-[[2-(acetylamino)-2-deoxy-b eta-D-galactopyranosyl]oxy]-1-oxopentyl]amino]propyl]amino] -3-oxopropoxy]methyl]-1,12,19,25-tetraoxo-16-oxa-13,20,24-t riazanonacos-1-yl]-4-hydroxy-2-pyrrolidinyl)methyl ester
atacatgagcaagatttgcat

SEQ ID NO: 714 - RNA, 21 nt, synthetic construct
  source 1..21: mol_type = other RNA
  modified_base 1: mod_base = OTHER; note = 2'-O-methyluridine-3'-phosphorothioate
  modified_base 2: mod_base = OTHER; note = 2'-O-methyladenosine-3'-phosphorothioate
  modified_base 3: mod_base = OTHER; note = 2'-O-methylcytidine-3'-phosphate
  modified_base 4: mod_base = OTHER; note = 2'-O-methyladenosine-3'-phosphate
  modified_base 5: mod_base = OTHER; note = 2'-O-methyluridine-3'-phosphate
  modified_base 6: mod_base = OTHER; note = 2'-O-methylguanosine-3'-phosphate
  modified_base 7: mod_base = OTHER; note = 2'-deoxy-2'-fluoroadenosine-3'-phosphate
  modified_base 8: mod_base = OTHER; note = 2'-O-methylguanosine-3'-phosphate
  modified_base 9: mod_base = OTHER; note = 2'-deoxy-2'-fluorocytidine-3'-phosphate
  modified_base 10: mod_base = OTHER; note = 2'-deoxy-2'-fluoroadenosine-3'-phosphate
  modified_base 11: mod_base = OTHER; note = 2'-deoxy-2'-fluoroadenosine-3'-phosphate
  modified_base 12: mod_base = OTHER; note = 2'-O-methylguanosine-3'-phosphate
  modified_base 13: mod_base = OTHER; note = 2'-O-methyladenosine-3'-phosphate
  modified_base 14: mod_base = OTHER; note = 2'-O-methyluridine-3'-phosphate
  modified_base 15: mod_base = OTHER; note = 2'-O-methyluridine-3'-phosphate
  modified_base 16: mod_base = OTHER; note = 2'-O-methyluridine-3'-phosphate
  modified_base 17: mod_base = OTHER; note = 2'-O-methylguanosine-3'-phosphate
  modified_base 18: mod_base = OTHER; note = 2'-O-methylcytidine-3'-phosphate
  modified_base 19: mod_base = OTHER; note = 2'-O-methyladenosine-3'-phosphate
  modified_base 20: mod_base = OTHER; note = 2'-O-methyladenosine-3'-phosphate
  modified_base 21: mod_base = OTHER; note = 2'-O-methyluridine-3'-phosphate ((2S,4R)-1-[29-[[2-(acetylamino)-2-deoxy-beta-D-galactopyra nosyl]oxy]-14,14-bis[[3-[[3-[[5-[[2-(acetylamino)-2-deoxy-b eta-D-galactopyranosyl]oxy]-1-oxopentyl]amino]propyl]amino] -3-oxopropoxy]methyl]-1,12,19,25-tetraoxo-16-oxa-13,20,24-t riazanonacos-1-yl]-4-hydroxy-2-pyrrolidinyl)methyl ester
tacatgagcaagatttgcaat

SEQ ID NO: 715 - RNA, 21 nt, synthetic construct
  source 1..21: mol_type = other RNA
  modified_base 1: mod_base = OTHER; note = 2'-O-methyladenosine-3'-phosphorothioate
  modified_base 2: mod_base = OTHER; note = 2'-O-methylcytidine-3'-phosphorothioate
  modified_base 3: mod_base = OTHER; note = 2'-O-methyladenosine-3'-phosphate
  modified_base 4: mod_base = OTHER; note = 2'-O-methyluridine-3'-phosphate
  modified_base 5: mod_base = OTHER; note = 2'-O-methylguanosine-3'-phosphate
  modified_base 6: mod_base = OTHER; note = 2'-O-methyladenosine-3'-phosphate
  modified_base 7: mod_base = OTHER; note = 2'-deoxy-2'-fluoroguanosine-3'-phosphate
  modified_base 8: mod_base = OTHER; note = 2'-O-methylcytidine-3'-phosphate
  modified_base 9: mod_base = OTHER; note = 2'-deoxy-2'-fluoroadenosine-3'-phosphate
  modified_base 10: mod_base = OTHER; note = 2'-deoxy-2'-fluoroadenosine-3'-phosphate
  modified_base 11: mod_base = OTHER; note = 2'-deoxy-2'-fluoroguanosine-3'-phosphate
  modified_base 12: mod_base = OTHER; note = 2'-O-methyladenosine-3'-phosphate
  modified_base 13: mod_base = OTHER; note = 2'-O-methyluridine-3'-phosphate
  modified_base 14: mod_base = OTHER; note = 2'-O-methyluridine-3'-phosphate
  modified_base 15: mod_base = OTHER; note = 2'-O-methyluridine-3'-phosphate
  modified_base 16: mod_base = OTHER; note = 2'-O-methylguanosine-3'-phosphate
  modified_base 17: mod_base = OTHER; note = 2'-O-methylcytidine-3'-phosphate
  modified_base 18: mod_base = OTHER; note = 2'-O-methyladenosine-3'-phosphate
  modified_base 19: mod_base = OTHER; note = 2'-O-methyladenosine-3'-phosphate
  modified_base 20: mod_base = OTHER; note = 2'-O-methylcytidine-3'-phosphate
  modified_base 21: mod_base = OTHER; note = 2'-O-methyluridine-3'-phosphate ((2S,4R)-1-[29-[[2-(acetylamino)-2-deoxy-beta-D-galactopyra nosyl]oxy]-14,14-bis[[3-[[3-[[5-[[2-(acetylamino)-2-deoxy-b eta-D-galactopyranosyl]oxy]-1-oxopentyl]amino]propyl]amino] -3-oxopropoxy]methyl]-1,12,19,25-tetraoxo-16-oxa-13,20,24-t riazanonacos-1-yl]-4-hydroxy-2-pyrrolidinyl)methyl ester
acatgagcaagatttgcaact

SEQ ID NO: 716 - RNA, 21 nt, synthetic construct
  source 1..21: mol_type = other RNA
  modified_base 1: mod_base = OTHER; note = 2'-O-methyluridine-3'-phosphorothioate
  modified_base 2: mod_base = OTHER; note = 2'-O-methylguanosine-3'-phosphorothioate
  modified_base 3: mod_base = OTHER; note = 2'-O-methyladenosine-3'-phosphate
  modified_base 4: mod_base = OTHER; note = 2'-O-methylguanosine-3'-phosphate
  modified_base 5: mod_base = OTHER; note = 2'-O-methylcytidine-3'-phosphate
  modified_base 6: mod_base = OTHER; note = 2'-O-methyladenosine-3'-phosphate
  modified_base 7: mod_base = OTHER; note = 2'-deoxy-2'-fluoroadenosine-3'-phosphate
  modified_base 8: mod_base = OTHER; note = 2'-O-methylguanosine-3'-phosphate
  modified_base 9: mod_base = OTHER; note = 2'-deoxy-2'-fluoroadenosine-3'-phosphate
  modified_base 10: mod_base = OTHER; note = 2'-deoxy-2'-fluorouridine-3'-phosphate
  modified_base 11: mod_base = OTHER; note = 2'-deoxy-2'-fluorouridine-3'-phosphate
  modified_base 12: mod_base = OTHER; note = 2'-O-methyluridine-3'-phosphate
  modified_base 13: mod_base = OTHER; note = 2'-O-methylguanosine-3'-phosphate
  modified_base 14: mod_base = OTHER; note = 2'-O-methylcytidine-3'-phosphate
  modified_base 15: mod_base = OTHER; note = 2'-O-methyladenosine-3'-phosphate
  modified_base 16: mod_base = OTHER; note = 2'-O-methyladenosine-3'-phosphate
  modified_base 17: mod_base = OTHER; note = 2'-O-methylcytidine-3'-phosphate
  modified_base 18: mod_base = OTHER; note = 2'-O-methyluridine-3'-phosphate
  modified_base 19: mod_base = OTHER; note = 2'-O-methyluridine-3'-phosphate
  modified_base 20: mod_base = OTHER; note = 2'-O-methylguanosine-3'-phosphate
  modified_base 21: mod_base = OTHER; note = 2'-O-methyluridine-3'-phosphate ((2S,4R)-1-[29-[[2-(acetylamino)-2-deoxy-beta-D-galactopyra nosyl]oxy]-14,14-bis[[3-[[3-[[5-[[2-(acetylamino)-2-deoxy-b eta-D-galactopyranosyl]oxy]-1-oxopentyl]amino]propyl]amino] -3-oxopropoxy]methyl]-1,12,19,25-tetraoxo-16-oxa-13,20,24-t riazanonacos-1-yl]-4-hydroxy-2-pyrrolidinyl)methyl ester
tgagcaagatttgcaacttgt

SEQ ID NO: 717 - RNA, 21 nt, synthetic construct
  source 1..21: mol_type = other RNA
  modified_base 1: mod_base = OTHER; note = 2'-O-methylguanosine-3'-phosphorothioate
  modified_base 2: mod_base = OTHER; note = 2'-O-methyladenosine-3'-phosphorothioate
  modified_base 3: mod_base = OTHER; note = 2'-O-methylguanosine-3'-phosphate
  modified_base 4: mod_base = OTHER; note = 2'-O-methylcytidine-3'-phosphate
  modified_base 5: mod_base = OTHER; note = 2'-O-methyladenosine-3'-phosphate
  modified_base 6: mod_base = OTHER; note = 2'-O-methyladenosine-3'-phosphate
  modified_base 7: mod_base = OTHER; note = 2'-deoxy-2'-fluoroguanosine-3'-phosphate
  modified_base 8: mod_base = OTHER; note = 2'-O-methyladenosine-3'-phosphate
  modified_base 9: mod_base = OTHER; note = 2'-deoxy-2'-fluorouridine-3'-phosphate
  modified_base 10: mod_base = OTHER; note = 2'-deoxy-2'-fluorouridine-3'-phosphate
  modified_base 11: mod_base = OTHER; note = 2'-deoxy-2'-fluorouridine-3'-phosphate
  modified_base 12: mod_base = OTHER; note = 2'-O-methylguanosine-3'-phosphate
  modified_base 13: mod_base = OTHER; note = 2'-O-methylcytidine-3'-phosphate
  modified_base 14: mod_base = OTHER; note = 2'-O-methyladenosine-3'-phosphate
  modified_base 15: mod_base = OTHER; note = 2'-O-methyladenosine-3'-phosphate
  modified_base 16: mod_base = OTHER; note = 2'-O-methylcytidine-3'-phosphate
  modified_base 17: mod_base = OTHER; note = 2'-O-methyluridine-3'-phosphate
  modified_base 18: mod_base = OTHER; note = 2'-O-methyluridine-3'-phosphate
  modified_base 19: mod_base = OTHER; note = 2'-O-methylguanosine-3'-phosphate
  modified_base 20: mod_base = OTHER; note = 2'-O-methylcytidine-3'-phosphate
  modified_base 21: mod_base = OTHER; note = 2'-O-methyluridine-3'-phosphate ((2S,4R)-1-[29-[[2-(acetylamino)-2-deoxy-beta-D-galactopyra nosyl]oxy]-14,14-bis[[3-[[3-[[5-[[2-(acetylamino)-2-deoxy-b eta-D-galactopyranosyl]oxy]-1-oxopentyl]amino]propyl]amino] -3-oxopropoxy]methyl]-1,12,19,25-tetraoxo-16-oxa-13,20,24-t riazanonacos-1-yl]-4-hydroxy-2-pyrrolidinyl)methyl ester
gagcaagatttgcaacttgct

SEQ ID NO: 718 - RNA, 21 nt, synthetic construct
  source 1..21: mol_type = other RNA
  modified_base 1: mod_base = OTHER; note = 2'-O-methyladenosine-3'-phosphorothioate
  modified_base 2: mod_base = OTHER; note = 2'-O-methylguanosine-3'-phosphorothioate
  modified_base 3: mod_base = OTHER; note = 2'-O-methylcytidine-3'-phosphate
  modified_base 4: mod_base = OTHER; note = 2'-O-methyladenosine-3'-phosphate
  modified_base 5: mod_base = OTHER; note = 2'-O-methyladenosine-3'-phosphate
  modified_base 6: mod_base = OTHER; note = 2'-O-methylguanosine-3'-phosphate
  modified_base 7: mod_base = OTHER; note = 2'-deoxy-2'-fluoroadenosine-3'-phosphate
  modified_base 8: mod_base = OTHER; note = 2'-O-methyluridine-3'-phosphate
  modified_base 9: mod_base = OTHER; note = 2'-deoxy-2'-fluorouridine-3'-phosphate
  modified_base 10: mod_base = OTHER; note = 2'-deoxy-2'-fluorouridine-3'-phosphate
  modified_base 11: mod_base = OTHER; note = 2'-deoxy-2'-fluoroguanosine-3'-phosphate
  modified_base 12: mod_base = OTHER; note = 2'-O-methylcytidine-3'-phosphate
  modified_base 13: mod_base = OTHER; note = 2'-O-methyladenosine-3'-phosphate
  modified_base 14: mod_base = OTHER; note = 2'-O-methyladenosine-3'-phosphate
  modified_base 15: mod_base = OTHER; note = 2'-O-methylcytidine-3'-phosphate
  modified_base 16: mod_base = OTHER; note = 2'-O-methyluridine-3'-phosphate
  modified_base 17: mod_base = OTHER; note = 2'-O-methyluridine-3'-phosphate
  modified_base 18: mod_base = OTHER; note = 2'-O-methylguanosine-3'-phosphate
  modified_base 19: mod_base = OTHER; note = 2'-O-methylcytidine-3'-phosphate
  modified_base 20: mod_base = OTHER; note = 2'-O-methyluridine-3'-phosphate
  modified_base 21: mod_base = OTHER; note = 2'-O-methyluridine-3'-phosphate ((2S,4R)-1-[29-[[2-(acetylamino)-2-deoxy-beta-D-galactopyra nosyl]oxy]-14,14-bis[[3-[[3-[[5-[[2-(acetylamino)-2-deoxy-b eta-D-galactopyranosyl]oxy]-1-oxopentyl]amino]propyl]amino] -3-oxopropoxy]methyl]-1,12,19,25-tetraoxo-16-oxa-13,20,24-t riazanonacos-1-yl]-4-hydroxy-2-pyrrolidinyl)methyl ester
agcaagatttgcaacttgctt

SEQ ID NO: 719 - RNA, 21 nt, synthetic construct
  source 1..21: mol_type = other RNA
  modified_base 1: mod_base = OTHER; note = 2'-O-methylguanosine-3'-phosphorothioate
  modified_base 2: mod_base = OTHER; note = 2'-O-methylcytidine-3'-phosphorothioate
  modified_base 3: mod_base = OTHER; note = 2'-O-methyladenosine-3'-phosphate
  modified_base 4: mod_base = OTHER; note = 2'-O-methyladenosine-3'-phosphate
  modified_base 5: mod_base = OTHER; note = 2'-O-methylguanosine-3'-phosphate
  modified_base 6: mod_base = OTHER; note = 2'-O-methyladenosine-3'-phosphate
  modified_base 7: mod_base = OTHER; note = 2'-deoxy-2'-fluorouridine-3'-phosphate
  modified_base 8: mod_base = OTHER; note = 2'-O-methyluridine-3'-phosphate
  modified_base 9: mod_base = OTHER; note = 2'-deoxy-2'-fluorouridine-3'-phosphate
  modified_base 10: mod_base = OTHER; note = 2'-deoxy-2'-fluoroguanosine-3'-phosphate
  modified_base 11: mod_base = OTHER; note = 2'-deoxy-2'-fluorocytidine-3'-phosphate
  modified_base 12: mod_base = OTHER; note = 2'-O-methyladenosine-3'-phosphate
  modified_base 13: mod_base = OTHER; note = 2'-O-methyladenosine-3'-phosphate
  modified_base 14: mod_base = OTHER; note = 2'-O-methylcytidine-3'-phosphate
  modified_base 15: mod_base = OTHER; note = 2'-O-methyluridine-3'-phosphate
  modified_base 16: mod_base = OTHER; note = 2'-O-methyluridine-3'-phosphate
  modified_base 17: mod_base = OTHER; note = 2'-O-methylguanosine-3'-phosphate
  modified_base 18: mod_base = OTHER; note = 2'-O-methylcytidine-3'-phosphate
  modified_base 19: mod_base = OTHER; note = 2'-O-methyluridine-3'-phosphate
  modified_base 20: mod_base = OTHER; note = 2'-O-methyladenosine-3'-phosphate
  modified_base 21: mod_base = OTHER; note = 2'-O-methyluridine-3'-phosphate ((2S,4R)-1-[29-[[2-(acetylamino)-2-deoxy-beta-D-galactopyra nosyl]oxy]-14,14-bis[[3-[[3-[[5-[[2-(acetylamino)-2-deoxy-b eta-D-galactopyranosyl]oxy]-1-oxopentyl]amino]propyl]amino] -3-oxopropoxy]methyl]-1,12,19,25-tetraoxo-16-oxa-13,20,24-t riazanonacos-1-yl]-4-hydroxy-2-pyrrolidinyl)methyl ester
gcaagatttgcaacttgctat

SEQ ID NO: 720 - RNA, 21 nt, synthetic construct
  source 1..21: mol_type = other RNA
  modified_base 1: mod_base = OTHER; note = 2'-O-methyluridine-3'-phosphorothioate
  modified_base 2: mod_base = OTHER; note = 2'-O-methylguanosine-3'-phosphorothioate
  modified_base 3: mod_base = OTHER; note = 2'-O-methylcytidine-3'-phosphate
  modified_base 4: mod_base = OTHER; note = 2'-O-methyladenosine-3'-phosphate
  modified_base 5: mod_base = OTHER; note = 2'-O-methyladenosine-3'-phosphate
  modified_base 6: mod_base = OTHER; note = 2'-O-methylcytidine-3'-phosphate
  modified_base 7: mod_base = OTHER; note = 2'-deoxy-2'-fluorouridine-3'-phosphate
  modified_base 8: mod_base = OTHER; note = 2'-O-methyluridine-3'-phosphate
  modified_base 9: mod_base = OTHER; note = 2'-deoxy-2'-fluoroguanosine-3'-phosphate
  modified_base 10: mod_base = OTHER; note = 2'-deoxy-2'-fluorocytidine-3'-phosphate
  modified_base 11: mod_base = OTHER; note = 2'-deoxy-2'-fluorouridine-3'-phosphate
  modified_base 12: mod_base = OTHER; note = 2'-O-methyladenosine-3'-phosphate
  modified_base 13: mod_base = OTHER; note = 2'-O-methylcytidine-3'-phosphate
  modified_base 14: mod_base = OTHER; note = 2'-O-methylcytidine-3'-phosphate
  modified_base 15: mod_base = OTHER; note = 2'-O-methylcytidine-3'-phosphate
  modified_base 16: mod_base = OTHER; note = 2'-O-methyladenosine-3'-phosphate
  modified_base 17: mod_base = OTHER; note = 2'-O-methyluridine-3'-phosphate
  modified_base 18: mod_base = OTHER; note = 2'-O-methyluridine-3'-phosphate
  modified_base 19: mod_base = OTHER; note = 2'-O-methyladenosine-3'-phosphate
  modified_base 20: mod_base = OTHER; note = 2'-O-methylguanosine-3'-phosphate
  modified_base 21: mod_base = OTHER; note = 2'-O-methyluridine-3'-phosphate ((2S,4R)-1-[29-[[2-(acetylamino)-2-deoxy-beta-D-galactopyra nosyl]oxy]-14,14-bis[[3-[[3-[[5-[[2-(acetylamino)-2-deoxy-b eta-D-galactopyranosyl]oxy]-1-oxopentyl]amino]propyl]amino] -3-oxopropoxy]methyl]-1,12,19,25-tetraoxo-16-oxa-13,20,24-t riazanonacos-1-yl]-4-hydroxy-2-pyrrolidinyl)methyl ester
tgcaacttgctacccattagt

SEQ ID NO: 721 - RNA, 21 nt, synthetic construct
  source 1..21: mol_type = other RNA
  modified_base 1: mod_base = OTHER; note = 2'-O-methylguanosine-3'-phosphorothioate
  modified_base 2: mod_base = OTHER; note = 2'-O-methylcytidine-3'-phosphorothioate
  modified_base 3: mod_base = OTHER; note = 2'-O-methyladenosine-3'-phosphate
  modified_base 4: mod_base = OTHER; note = 2'-O-methyladenosine-3'-phosphate
  modified_base 5: mod_base = OTHER; note = 2'-O-methylcytidine-3'-phosphate
  modified_base 6: mod_base = OTHER; note = 2'-O-methyluridine-3'-phosphate
  modified_base 7: mod_base = OTHER; note = 2'-deoxy-2'-fluorouridine-3'-phosphate
  modified_base 8: mod_base = OTHER; note = 2'-O-methylguanosine-3'-phosphate
  modified_base 9: mod_base = OTHER; note = 2'-deoxy-2'-fluorocytidine-3'-phosphate
  modified_base 10: mod_base = OTHER; note = 2'-deoxy-2'-fluorouridine-3'-phosphate
  modified_base 11: mod_base = OTHER; note = 2'-deoxy-2'-fluoroadenosine-3'-phosphate
  modified_base 12: mod_base = OTHER; note = 2'-O-methylcytidine-3'-phosphate
  modified_base 13: mod_base = OTHER; note = 2'-O-methylcytidine-3'-phosphate
  modified_base 14: mod_base = OTHER; note = 2'-O-methylcytidine-3'-phosphate
  modified_base 15: mod_base = OTHER; note = 2'-O-methyladenosine-3'-phosphate
  modified_base 16: mod_base = OTHER; note = 2'-O-methyluridine-3'-phosphate
  modified_base 17: mod_base = OTHER; note = 2'-O-methyluridine-3'-phosphate
  modified_base 18: mod_base = OTHER; note = 2'-O-methyladenosine-3'-phosphate
  modified_base 19: mod_base = OTHER; note = 2'-O-methylguanosine-3'-phosphate
  modified_base 20: mod_base = OTHER; note = 2'-O-methylguanosine-3'-phosphate
  modified_base 21: mod_base = OTHER; note = 2'-O-methyluridine-3'-phosphate ((2S,4R)-1-[29-[[2-(acetylamino)-2-deoxy-beta-D-galactopyra nosyl]oxy]-14,14-bis[[3-[[3-[[5-[[2-(acetylamino)-2-deoxy-b eta-D-galactopyranosyl]oxy]-1-oxopentyl]amino]propyl]amino] -3-oxopropoxy]methyl]-1,12,19,25-tetraoxo-16-oxa-13,20,24-t riazanonacos-1-yl]-4-hydroxy-2-pyrrolidinyl)methyl ester
gcaacttgctacccattaggt

SEQ ID NO: 722 - RNA, 21 nt, synthetic construct
  source 1..21: mol_type = other RNA
  modified_base 1: mod_base = OTHER; note = 2'-O-methylcytidine-3'-phosphorothioate
  modified_base 2: mod_base = OTHER; note = 2'-O-methyladenosine-3'-phosphorothioate
  modified_base 3: mod_base = OTHER; note = 2'-O-methyladenosine-3'-phosphate
  modified_base 4: mod_base = OTHER; note = 2'-O-methylcytidine-3'-phosphate
  modified_base 5: mod_base = OTHER; note = 2'-O-methyluridine-3'-phosphate
  modified_base 6: mod_base = OTHER; note = 2'-O-methyluridine-3'-phosphate
  modified_base 7: mod_base = OTHER; note = 2'-deoxy-2'-fluoroguanosine-3'-phosphate
  modified_base 8: mod_base = OTHER; note = 2'-O-methylcytidine-3'-phosphate
  modified_base 9: mod_base = OTHER; note = 2'-deoxy-2'-fluorouridine-3'-phosphate
  modified_base 10: mod_base = OTHER; note = 2'-deoxy-2'-fluoroadenosine-3'-phosphate
  modified_base 11: mod_base = OTHER; note = 2'-deoxy-2'-fluorocytidine-3'-phosphate
  modified_base 12: mod_base = OTHER; note = 2'-O-methylcytidine-3'-phosphate
  modified_base 13: mod_base = OTHER; note = 2'-O-methylcytidine-3'-phosphate
  modified_base 14: mod_base = OTHER; note = 2'-O-methyladenosine-3'-phosphate
  modified_base 15: mod_base = OTHER; note = 2'-O-methyluridine-3'-phosphate
  modified_base 16: mod_base = OTHER; note = 2'-O-methyluridine-3'-phosphate
  modified_base 17: mod_base = OTHER; note = 2'-O-methyladenosine-3'-phosphate
  modified_base 18: mod_base = OTHER; note = 2'-O-methylguanosine-3'-phosphate
  modified_base 19: mod_base = OTHER; note = 2'-O-methylguanosine-3'-phosphate
  modified_base 20: mod_base = OTHER; note = 2'-O-methyladenosine-3'-phosphate
  modified_base 21: mod_base = OTHER; note = 2'-O-methyluridine-3'-phosphate ((2S,4R)-1-[29-[[2-(acetylamino)-2-deoxy-beta-D-galactopyra nosyl]oxy]-14,14-bis[[3-[[3-[[5-[[2-(acetylamino)-2-deoxy-b eta-D-galactopyranosyl]oxy]-1-oxopentyl]amino]propyl]amino] -3-oxopropoxy]methyl]-1,12,19,25-tetraoxo-16-oxa-13,20,24-t riazanonacos-1-yl]-4-hydroxy-2-pyrrolidinyl)methyl ester
caacttgctacccattaggat

SEQ ID NO: 723 - RNA, 21 nt, synthetic construct
  source 1..21: mol_type = other RNA
  modified_base 1: mod_base = OTHER; note = 2'-O-methyladenosine-3'-phosphorothioate
  modified_base 2: mod_base = OTHER; note = 2'-O-methyladenosine-3'-phosphorothioate
  modified_base 3: mod_base = OTHER; note = 2'-O-methylcytidine-3'-phosphate
  modified_base 4: mod_base = OTHER; note = 2'-O-methyluridine-3'-phosphate
  modified_base 5: mod_base = OTHER; note = 2'-O-methyluridine-3'-phosphate
  modified_base 6: mod_base = OTHER; note = 2'-O-methylguanosine-3'-phosphate
  modified_base 7: mod_base = OTHER; note = 2'-deoxy-2'-fluorocytidine-3'-phosphate
  modified_base 8: mod_base = OTHER; note = 2'-O-methyluridine-3'-phosphate
  modified_base 9: mod_base = OTHER; note = 2'-deoxy-2'-fluoroadenosine-3'-phosphate
  modified_base 10: mod_base = OTHER; note = 2'-deoxy-2'-fluorocytidine-3'-phosphate
  modified_base 11: mod_base = OTHER; note = 2'-deoxy-2'-fluorocytidine-3'-phosphate
  modified_base 12: mod_base = OTHER; note = 2'-O-methylcytidine-3'-phosphate
  modified_base 13: mod_base = OTHER; note = 2'-O-methyladenosine-3'-phosphate
  modified_base 14: mod_base = OTHER; note = 2'-O-methyluridine-3'-phosphate
  modified_base 15: mod_base = OTHER; note = 2'-O-methyluridine-3'-phosphate
  modified_base 16: mod_base = OTHER; note = 2'-O-methyladenosine-3'-phosphate
  modified_base 17: mod_base = OTHER; note = 2'-O-methylguanosine-3'-phosphate
  modified_base 18: mod_base = OTHER; note = 2'-O-methylguanosine-3'-phosphate
  modified_base 19: mod_base = OTHER; note = 2'-O-methyladenosine-3'-phosphate
  modified_base 20: mod_base = OTHER; note = 2'-O-methyluridine-3'-phosphate
  modified_base 21: mod_base = OTHER; note = 2'-O-methyluridine-3'-phosphate ((2S,4R)-1-[29-[[2-(acetylamino)-2-deoxy-beta-D-galactopyra nosyl]oxy]-14,14-bis[[3-[[3-[[5-[[2-(acetylamino)-2-deoxy-b eta-D-galactopyranosyl]oxy]-1-oxopentyl]amino]propyl]amino] -3-oxopropoxy]methyl]-1,12,19,25-tetraoxo-16-oxa-13,20,24-t riazanonacos-1-yl]-4-hydroxy-2-pyrrolidinyl)methyl ester
aacttgctacccattaggatt

SEQ ID NO: 724 - RNA, 21 nt, synthetic construct
  source 1..21: mol_type = other RNA
  modified_base 1: mod_base = OTHER; note = 2'-O-methyladenosine-3'-phosphorothioate
  modified_base 2: mod_base = OTHER; note = 2'-O-methylcytidine-3'-phosphorothioate
  modified_base 3: mod_base = OTHER; note = 2'-O-methyluridine-3'-phosphate
  modified_base 4: mod_base = OTHER; note = 2'-O-methyluridine-3'-phosphate
  modified_base 5: mod_base = OTHER; note = 2'-O-methylguanosine-3'-phosphate
  modified_base 6: mod_base = OTHER; note = 2'-O-methylcytidine-3'-phosphate
  modified_base 7: mod_base = OTHER; note = 2'-deoxy-2'-fluorouridine-3'-phosphate
  modified_base 8: mod_base = OTHER; note = 2'-O-methyladenosine-3'-phosphate
  modified_base 9: mod_base = OTHER; note = 2'-deoxy-2'-fluorocytidine-3'-phosphate
  modified_base 10: mod_base = OTHER; note = 2'-deoxy-2'-fluorocytidine-3'-phosphate
  modified_base 11: mod_base = OTHER; note = 2'-deoxy-2'-fluorocytidine-3'-phosphate
  modified_base 12: mod_base = OTHER; note = 2'-O-methyladenosine-3'-phosphate
  modified_base 13: mod_base = OTHER; note = 2'-O-methyluridine-3'-phosphate
  modified_base 14: mod_base = OTHER; note = 2'-O-methyluridine-3'-phosphate
  modified_base 15: mod_base = OTHER; note = 2'-O-methyladenosine-3'-phosphate
  modified_base 16: mod_base = OTHER; note = 2'-O-methylguanosine-3'-phosphate
  modified_base 17: mod_base = OTHER; note = 2'-O-methylguanosine-3'-phosphate
  modified_base 18: mod_base = OTHER; note = 2'-O-methyladenosine-3'-phosphate
  modified_base 19: mod_base = OTHER; note = 2'-O-methyluridine-3'-phosphate
  modified_base 20: mod_base = OTHER; note = 2'-O-methyladenosine-3'-phosphate
  modified_base 21: mod_base = OTHER; note = 2'-O-methyluridine-3'-phosphate ((2S,4R)-1-[29-[[2-(acetylamino)-2-deoxy-beta-D-galactopyra nosyl]oxy]-14,14-bis[[3-[[3-[[5-[[2-(acetylamino)-2-deoxy-b eta-D-galactopyranosyl]oxy]-1-oxopentyl]amino]propyl]amino] -3-oxopropoxy]methyl]-1,12,19,25-tetraoxo-16-oxa-13,20,24-t riazanonacos-1-yl]-4-hydroxy-2-pyrrolidinyl)methyl ester
acttgctacccattaggatat

SEQ ID NO: 725 - RNA, 21 nt, synthetic construct
  source 1..21: mol_type = other RNA
  modified_base 1: mod_base = OTHER; note = 2'-O-methylguanosine-3'-phosphorothioate
  modified_base 2: mod_base = OTHER; note = 2'-O-methylcytidine-3'-phosphorothioate
  modified_base 3: mod_base = OTHER; note = 2'-O-methyluridine-3'-phosphate
  modified_base 4: mod_base = OTHER; note = 2'-O-methylguanosine-3'-phosphate
  modified_base 5: mod_base = OTHER; note = 2'-O-methylcytidine-3'-phosphate
  modified_base 6: mod_base = OTHER; note = 2'-O-methylcytidine-3'-phosphate
  modified_base 7: mod_base = OTHER; note = 2'-deoxy-2'-fluorocytidine-3'-phosphate
  modified_base 8: mod_base = OTHER; note = 2'-O-methyluridine-3'-phosphate
  modified_base 9: mod_base = OTHER; note = 2'-deoxy-2'-fluoroguanosine-3'-phosphate
  modified_base 10: mod_base = OTHER; note = 2'-deoxy-2'-fluorouridine-3'-phosphate
  modified_base 11: mod_base = OTHER; note = 2'-deoxy-2'-fluoroadenosine-3'-phosphate
  modified_base 12: mod_base = OTHER; note = 2'-O-methylcytidine-3'-phosphate
  modified_base 13: mod_base = OTHER; note = 2'-O-methylcytidine-3'-phosphate
  modified_base 14: mod_base = OTHER; note = 2'-O-methylcytidine-3'-phosphate
  modified_base 15: mod_base = OTHER; note = 2'-O-methyluridine-3'-phosphate
  modified_base 16: mod_base = OTHER; note = 2'-O-methylguanosine-3'-phosphate
  modified_base 17: mod_base = OTHER; note = 2'-O-methylcytidine-3'-phosphate
  modified_base 18: mod_base = OTHER; note = 2'-O-methylcytidine-3'-phosphate
  modified_base 19: mod_base = OTHER; note = 2'-O-methyluridine-3'-phosphate
  modified_base 20: mod_base = OTHER; note = 2'-O-methylguanosine-3'-phosphate
  modified_base 21: mod_base = OTHER; note = 2'-O-methyluridine-3'-phosphate ((2S,4R)-1-[29-[[2-(acetylamino)-2-deoxy-beta-D-galactopyra nosyl]oxy]-14,14-bis[[3-[[3-[[5-[[2-(acetylamino)-2-deoxy-b eta-D-galactopyranosyl]oxy]-1-oxopentyl]amino]propyl]amino] -3-oxopropoxy]methyl]-1,12,19,25-tetraoxo-16-oxa-13,20,24-t riazanonacos-1-yl]-4-hydroxy-2-pyrrolidinyl)methyl ester
gctgccctgtaccctgcctgt

SEQ ID NO: 726 - RNA, 21 nt, synthetic construct
  source 1..21: mol_type = other RNA
  modified_base 1: mod_base = OTHER; note = 2'-O-methylcytidine-3'-phosphorothioate
  modified_base 2: mod_base = OTHER; note = 2'-O-methylcytidine-3'-phosphorothioate
  modified_base 3: mod_base = OTHER; note = 2'-O-methylcytidine-3'-phosphate
  modified_base 4: mod_base = OTHER; note = 2'-O-methyluridine-3'-phosphate
  modified_base 5: mod_base = OTHER; note = 2'-O-methylguanosine-3'-phosphate
  modified_base 6: mod_base = OTHER; note = 2'-O-methyluridine-3'-phosphate
  modified_base 7: mod_base = OTHER; note = 2'-deoxy-2'-fluoroadenosine-3'-phosphate
  modified_base 8: mod_base = OTHER; note = 2'-O-methylcytidine-3'-phosphate
  modified_base 9: mod_base = OTHER; note = 2'-deoxy-2'-fluorocytidine-3'-phosphate
  modified_base 10: mod_base = OTHER; note = 2'-deoxy-2'-fluorocytidine-3'-phosphate
  modified_base 11: mod_base = OTHER; note = 2'-deoxy-2'-fluorouridine-3'-phosphate
  modified_base 12: mod_base = OTHER; note = 2'-O-methylguanosine-3'-phosphate
  modified_base 13: mod_base = OTHER; note = 2'-O-methylcytidine-3'-phosphate
  modified_base 14: mod_base = OTHER; note = 2'-O-methylcytidine-3'-phosphate
  modified_base 15: mod_base = OTHER; note = 2'-O-methyluridine-3'-phosphate
  modified_base 16: mod_base = OTHER; note = 2'-O-methylguanosine-3'-phosphate
  modified_base 17: mod_base = OTHER; note = 2'-O-methyluridine-3'-phosphate
  modified_base 18: mod_base = OTHER; note = 2'-O-methylguanosine-3'-phosphate
  modified_base 19: mod_base = OTHER; note = 2'-O-methylguanosine-3'-phosphate
  modified_base 20: mod_base = OTHER; note = 2'-O-methyladenosine-3'-phosphate
  modified_base 21: mod_base = OTHER; note = 2'-O-methyluridine-3'-phosphate ((2S,4R)-1-[29-[[2-(acetylamino)-2-deoxy-beta-D-galactopyra nosyl]oxy]-14,14-bis[[3-[[3-[[5-[[2-(acetylamino)-2-deoxy-b eta-D-galactopyranosyl]oxy]-1-oxopentyl]amino]propyl]amino] -3-oxopropoxy]methyl]-1,12,19,25-tetraoxo-16-oxa-13,20,24-t riazanonacos-1-yl]-4-hydroxy-2-pyrrolidinyl)methyl ester
ccctgtaccctgcctgtggat

SEQ ID NO: 727 - RNA, 21 nt, synthetic construct
  source 1..21: mol_type = other RNA
  modified_base 1: mod_base = OTHER; note = 2'-O-methyladenosine-3'-phosphorothioate
  modified_base 2: mod_base = OTHER; note = 2'-O-methyladenosine-3'-phosphorothioate
  modified_base 3: mod_base = OTHER; note = 2'-O-methyluridine-3'-phosphate
  modified_base 4: mod_base = OTHER; note = 2'-O-methylcytidine-3'-phosphate
  modified_base 5: mod_base = OTHER; note = 2'-O-methyluridine-3'-phosphate
  modified_base 6: mod_base = OTHER; note = 2'-O-methylguanosine-3'-phosphate
  modified_base 7: mod_base = OTHER; note = 2'-deoxy-2'-fluorocytidine-3'-phosphate
  modified_base 8: mod_base = OTHER; note = 2'-O-methylcytidine-3'-phosphate
  modified_base 9: mod_base = OTHER; note = 2'-deoxy-2'-fluoroadenosine-3'-phosphate
  modified_base 10: mod_base = OTHER; note = 2'-deoxy-2'-fluorouridine-3'-phosphate
  modified_base 11: mod_base = OTHER; note = 2'-deoxy-2'-fluorouridine-3'-phosphate
  modified_base 12: mod_base = OTHER; note = 2'-O-methylguanosine-3'-phosphate
  modified_base 13: mod_base = OTHER; note = 2'-O-methylcytidine-3'-phosphate
  modified_base 14: mod_base = OTHER; note = 2'-O-methylguanosine-3'-phosphate
  modified_base 15: mod_base = OTHER; note = 2'-O-methyladenosine-3'-phosphate
  modified_base 16: mod_base = OTHER; note = 2'-O-methyluridine-3'-phosphate
  modified_base 17: mod_base = OTHER; note = 2'-O-methyluridine-3'-phosphate
  modified_base 18: mod_base = OTHER; note = 2'-O-methylguanosine-3'-phosphate
  modified_base 19: mod_base = OTHER; note = 2'-O-methyluridine-3'-phosphate
  modified_base 20: mod_base = OTHER; note = 2'-O-methylcytidine-3'-phosphate
  modified_base 21: mod_base = OTHER; note = 2'-O-methyluridine-3'-phosphate ((2S,4R)-1-[29-[[2-(acetylamino)-2-deoxy-beta-D-galactopyra nosyl]oxy]-14,14-bis[[3-[[3-[[5-[[2-(acetylamino)-2-deoxy-b eta-D-galactopyranosyl]oxy]-1-oxopentyl]amino]propyl]amino] -3-oxopropoxy]methyl]-1,12,19,25-tetraoxo-16-oxa-13,20,24-t riazanonacos-1-yl]-4-hydroxy-2-pyrrolidinyl)methyl ester
aatctgccattgcgattgtct

SEQ ID NO: 728 - RNA, 21 nt, synthetic construct
  source 1..21: mol_type = other RNA
  modified_base 1: mod_base = OTHER; note = 2'-O-methylcytidine-3'-phosphorothioate
  modified_base 2: mod_base = OTHER; note = 2'-O-methyluridine-3'-phosphorothioate
  modified_base 3: mod_base = OTHER; note = 2'-O-methylguanosine-3'-phosphate
  modified_base 4: mod_base = OTHER; note = 2'-O-methylcytidine-3'-phosphate
  modified_base 5: mod_base = OTHER; note = 2'-O-methylcytidine-3'-phosphate
  modified_base 6: mod_base = OTHER; note = 2'-O-methyladenosine-3'-phosphate
  modified_base 7: mod_base = OTHER; note = 2'-deoxy-2'-fluorouridine-3'-phosphate
  modified_base 8: mod_base = OTHER; note = 2'-O-methyluridine-3'-phosphate
  modified_base 9: mod_base = OTHER; note = 2'-deoxy-2'-fluoroguanosine-3'-phosphate
  modified_base 10: mod_base = OTHER; note = 2'-deoxy-2'-fluorocytidine-3'-phosphate
  modified_base 11: mod_base = OTHER; note = 2'-deoxy-2'-fluoroguanosine-3'-phosphate
  modified_base 12: mod_base = OTHER; note = 2'-O-methyladenosine-3'-phosphate
  modified_base 13: mod_base = OTHER; note = 2'-O-methyluridine-3'-phosphate
  modified_base 14: mod_base = OTHER; note = 2'-O-methyluridine-3'-phosphate
  modified_base 15: mod_base = OTHER; note = 2'-O-methylguanosine-3'-phosphate
  modified_base 16: mod_base = OTHER; note = 2'-O-methyluridine-3'-phosphate
  modified_base 17: mod_base = OTHER; note = 2'-O-methylcytidine-3'-phosphate
  modified_base 18: mod_base = OTHER; note = 2'-O-methylcytidine-3'-phosphate
  modified_base 19: mod_base = OTHER; note = 2'-O-methyladenosine-3'-phosphate
  modified_base 20: mod_base = OTHER; note = 2'-O-methylguanosine-3'-phosphate
  modified_base 21: mod_base = OTHER; note = 2'-O-methyluridine-3'-phosphate ((2S,4R)-1-[29-[[2-(acetylamino)-2-deoxy-beta-D-galactopyra nosyl]oxy]-14,14-bis[[3-[[3-[[5-[[2-(acetylamino)-2-deoxy-b eta-D-galactopyranosyl]oxy]-1-oxopentyl]amino]propyl]amino] -3-oxopropoxy]methyl]-1,12,19,25-tetraoxo-16-oxa-13,20,24-t riazanonacos-1-yl]-4-hydroxy-2-pyrrolidinyl)methyl ester
ctgccattgcgattgtccagt

SEQ ID NO: 729 - RNA, 21 nt, synthetic construct
  source 1..21: mol_type = other RNA
  modified_base 1: mod_base = OTHER; note = 2'-O-methyluridine-3'-phosphorothioate
  modified_base 2: mod_base = OTHER; note = 2'-O-methylguanosine-3'-phosphorothioate
  modified_base 3: mod_base = OTHER; note = 2'-O-methylcytidine-3'-phosphate
  modified_base 4: mod_base = OTHER; note = 2'-O-methylcytidine-3'-phosphate
  modified_base 5: mod_base = OTHER; note = 2'-O-methyladenosine-3'-phosphate
  modified_base 6: mod_base = OTHER; note = 2'-O-methyluridine-3'-phosphate
  modified_base 7: mod_base = OTHER; note = 2'-deoxy-2'-fluorouridine-3'-phosphate
  modified_base 8: mod_base = OTHER; note = 2'-O-methylguanosine-3'-phosphate
  modified_base 9: mod_base = OTHER; note = 2'-deoxy-2'-fluorocytidine-3'-phosphate
  modified_base 10: mod_base = OTHER; note = 2'-deoxy-2'-fluoroguanosine-3'-phosphate
  modified_base 11: mod_base = OTHER; note = 2'-deoxy-2'-fluoroadenosine-3'-phosphate
  modified_base 12: mod_base = OTHER; note = 2'-O-methyluridine-3'-phosphate
  modified_base 13: mod_base = OTHER; note = 2'-O-methyluridine-3'-phosphate
  modified_base 14: mod_base = OTHER; note = 2'-O-methylguanosine-3'-phosphate
  modified_base 15: mod_base = OTHER; note = 2'-O-methyluridine-3'-phosphate
  modified_base 16: mod_base = OTHER; note = 2'-O-methylcytidine-3'-phosphate
  modified_base 17: mod_base = OTHER; note = 2'-O-methylcytidine-3'-phosphate
  modified_base 18: mod_base = OTHER; note = 2'-O-methyladenosine-3'-phosphate
  modified_base 19: mod_base = OTHER; note = 2'-O-methylguanosine-3'-phosphate
  modified_base 20: mod_base = OTHER; note = 2'-O-methyladenosine-3'-phosphate
  modified_base 21: mod_base = OTHER; note = 2'-O-methyluridine-3'-phosphate ((2S,4R)-1-[29-[[2-(acetylamino)-2-deoxy-beta-D-galactopyra nosyl]oxy]-14,14-bis[[3-[[3-[[5-[[2-(acetylamino)-2-deoxy-b eta-D-galactopyranosyl]oxy]-1-oxopentyl]amino]propyl]amino] -3-oxopropoxy]methyl]-1,12,19,25-tetraoxo-16-oxa-13,20,24-t riazanonacos-1-yl]-4-hydroxy-2-pyrrolidinyl)methyl ester
tgccattgcgattgtccagat

SEQ ID NO: 730 - RNA, 21 nt, synthetic construct
  source 1..21: mol_type = other RNA
  modified_base 1: mod_base = OTHER; note = 2'-O-methylcytidine-3'-phosphorothioate
  modified_base 2: mod_base = OTHER; note = 2'-O-methyladenosine-3'-phosphorothioate
  modified_base 3: mod_base = OTHER; note = 2'-O-methyluridine-3'-phosphate
  modified_base 4: mod_base = OTHER; note = 2'-O-methyluridine-3'-phosphate
  modified_base 5: mod_base = OTHER; note = 2'-O-methylguanosine-3'-phosphate
  modified_base 6: mod_base = OTHER; note = 2'-O-methylcytidine-3'-phosphate
  modified_base 7: mod_base = OTHER; note = 2'-deoxy-2'-fluoroguanosine-3'-phosphate
  modified_base 8: mod_base = OTHER; note = 2'-O-methyladenosine-3'-phosphate
  modified_base 9: mod_base = OTHER; note = 2'-deoxy-2'-fluorouridine-3'-phosphate
  modified_base 10: mod_base = OTHER; note = 2'-deoxy-2'-fluorouridine-3'-phosphate
  modified_base 11: mod_base = OTHER; note = 2'-deoxy-2'-fluoroguanosine-3'-phosphate
  modified_base 12: mod_base = OTHER; note = 2'-O-methyluridine-3'-phosphate
  modified_base 13: mod_base = OTHER; note = 2'-O-methylcytidine-3'-phosphate
  modified_base 14: mod_base = OTHER; note = 2'-O-methylcytidine-3'-phosphate
  modified_base 15: mod_base = OTHER; note = 2'-O-methyladenosine-3'-phosphate
  modified_base 16: mod_base = OTHER; note = 2'-O-methylguanosine-3'-phosphate
  modified_base 17: mod_base = OTHER; note = 2'-O-methyladenosine-3'-phosphate
  modified_base 18: mod_base = OTHER; note = 2'-O-methylguanosine-3'-phosphate
  modified_base 19: mod_base = OTHER; note = 2'-O-methyladenosine-3'-phosphate
  modified_base 20: mod_base = OTHER; note = 2'-O-methylcytidine-3'-phosphate
  modified_base 21: mod_base = OTHER; note = 2'-O-methyluridine-3'-phosphate ((2S,4R)-1-[29-[[2-(acetylamino)-2-deoxy-beta-D-galactopyra nosyl]oxy]-14,14-bis[[3-[[3-[[5-[[2-(acetylamino)-2-deoxy-b eta-D-galactopyranosyl]oxy]-1-oxopentyl]amino]propyl]amino] -3-oxopropoxy]methyl]-1,12,19,25-tetraoxo-16-oxa-13,20,24-t riazanonacos-1-yl]-4-hydroxy-2-pyrrolidinyl)methyl ester
cattgcgattgtccagagact

SEQ ID NO: 731 - RNA, 21 nt, synthetic construct
  source 1..21: mol_type = other RNA
  modified_base 1: mod_base = OTHER; note = 2'-O-methyluridine-3'-phosphorothioate
  modified_base 2: mod_base = OTHER; note = 2'-O-methyluridine-3'-phosphorothioate
  modified_base 3: mod_base = OTHER; note = 2'-O-methylguanosine-3'-phosphate
  modified_base 4: mod_base = OTHER; note = 2'-O-methylcytidine-3'-phosphate
  modified_base 5: mod_base = OTHER; note = 2'-O-methylguanosine-3'-phosphate
  modified_base 6: mod_base = OTHER; note = 2'-O-methyladenosine-3'-phosphate
  modified_base 7: mod_base = OTHER; note = 2'-deoxy-2'-fluorouridine-3'-phosphate
  modified_base 8: mod_base = OTHER; note = 2'-O-methyluridine-3'-phosphate
  modified_base 9: mod_base = OTHER; note = 2'-deoxy-2'-fluoroguanosine-3'-phosphate
  modified_base 10: mod_base = OTHER; note = 2'-deoxy-2'-fluorouridine-3'-phosphate
  modified_base 11: mod_base = OTHER; note = 2'-deoxy-2'-fluorocytidine-3'-phosphate
  modified_base 12: mod_base = OTHER; note = 2'-O-methylcytidine-3'-phosphate
  modified_base 13: mod_base = OTHER; note = 2'-O-methyladenosine-3'-phosphate
  modified_base 14: mod_base = OTHER; note = 2'-O-methylguanosine-3'-phosphate
  modified_base 15: mod_base = OTHER; note = 2'-O-methyladenosine-3'-phosphate
  modified_base 16: mod_base = OTHER; note = 2'-O-methylguanosine-3'-phosphate
  modified_base 17: mod_base = OTHER; note = 2'-O-methyladenosine-3'-phosphate
  modified_base 18: mod_base = OTHER; note = 2'-O-methylcytidine-3'-phosphate
  modified_base 19: mod_base = OTHER; note = 2'-O-methyluridine-3'-phosphate
  modified_base 20: mod_base = OTHER; note = 2'-O-methylguanosine-3'-phosphate
  modified_base 21: mod_base = OTHER; note = 2'-O-methyluridine-3'-phosphate ((2S,4R)-1-[29-[[2-(acetylamino)-2-deoxy-beta-D-galactopyra nosyl]oxy]-14,14-bis[[3-[[3-[[5-[[2-(acetylamino)-2-deoxy-b eta-D-galactopyranosyl]oxy]-1-oxopentyl]amino]propyl]amino] -3-oxopropoxy]methyl]-1,12,19,25-tetraoxo-16-oxa-13,20,24-t riazanonacos-1-yl]-4-hydroxy-2-pyrrolidinyl)methyl ester
ttgcgattgtccagagactgt

SEQ ID NO: 732 - RNA, 21 nt, synthetic construct
  source 1..21: mol_type = other RNA
  modified_base 1: mod_base = OTHER; note = 2'-O-methyluridine-3'-phosphorothioate
  modified_base 2: mod_base = OTHER; note = 2'-O-methylguanosine-3'-phosphorothioate
  modified_base 3: mod_base = OTHER; note = 2'-O-methylcytidine-3'-phosphate
  modified_base 4: mod_base = OTHER; note = 2'-O-methylguanosine-3'-phosphate
  modified_base 5: mod_base = OTHER; note = 2'-O-methyladenosine-3'-phosphate
  modified_base 6: mod_base = OTHER; note = 2'-O-methyluridine-3'-phosphate
  modified_base 7: mod_base = OTHER; note = 2'-deoxy-2'-fluorouridine-3'-phosphate
  modified_base 8: mod_base = OTHER; note = 2'-O-methylguanosine-3'-phosphate
  modified_base 9: mod_base = OTHER; note = 2'-deoxy-2'-fluorouridine-3'-phosphate
  modified_base 10: mod_base = OTHER; note = 2'-deoxy-2'-fluorocytidine-3'-phosphate
  modified_base 11: mod_base = OTHER; note = 2'-deoxy-2'-fluorocytidine-3'-phosphate
  modified_base 12: mod_base = OTHER; note = 2'-O-methyladenosine-3'-phosphate
  modified_base 13: mod_base = OTHER; note = 2'-O-methylguanosine-3'-phosphate
  modified_base 14: mod_base = OTHER; note = 2'-O-methyladenosine-3'-phosphate
  modified_base 15: mod_base = OTHER; note = 2'-O-methylguanosine-3'-phosphate
  modified_base 16: mod_base = OTHER; note = 2'-O-methyladenosine-3'-phosphate
  modified_base 17: mod_base = OTHER; note = 2'-O-methylcytidine-3'-phosphate
  modified_base 18: mod_base = OTHER; note = 2'-O-methyluridine-3'-phosphate
  modified_base 19: mod_base = OTHER; note = 2'-O-methylguanosine-3'-phosphate
  modified_base 20: mod_base = OTHER; note = 2'-O-methylguanosine-3'-phosphate
  modified_base 21: mod_base = OTHER; note = 2'-O-methyluridine-3'-phosphate ((2S,4R)-1-[29-[[2-(acetylamino)-2-deoxy-beta-D-galactopyra nosyl]oxy]-14,14-bis[[3-[[3-[[5-[[2-(acetylamino)-2-deoxy-b eta-D-galactopyranosyl]oxy]-1-oxopentyl]amino]propyl]amino] -3-oxopropoxy]methyl]-1,12,19,25-tetraoxo-16-oxa-13,20,24-t riazanonacos-1-yl]-4-hydroxy-2-pyrrolidinyl)methyl ester
tgcgattgtccagagactggt

SEQ ID NO: 733 - RNA, 21 nt, synthetic construct
  source 1..21: mol_type = other RNA
  modified_base 1: mod_base = OTHER; note = 2'-O-methylguanosine-3'-phosphorothioate
  modified_base 2: mod_base = OTHER; note = 2'-O-methylcytidine-3'-phosphorothioate
  modified_base 3: mod_base = OTHER; note = 2'-O-methylguanosine-3'-phosphate
  modified_base 4: mod_base = OTHER; note = 2'-O-methyladenosine-3'-phosphate
  modified_base 5: mod_base = OTHER; note = 2'-O-methyluridine-3'-phosphate
  modified_base 6: mod_base = OTHER; note = 2'-O-methyluridine-3'-phosphate
  modified_base 7: mod_base = OTHER; note = 2'-deoxy-2'-fluoroguanosine-3'-phosphate
  modified_base 8: mod_base = OTHER; note = 2'-O-methyluridine-3'-phosphate
  modified_base 9: mod_base = OTHER; note = 2'-deoxy-2'-fluorocytidine-3'-phosphate
  modified_base 10: mod_base = OTHER; note = 2'-deoxy-2'-fluorocytidine-3'-phosphate
  modified_base 11: mod_base = OTHER; note = 2'-deoxy-2'-fluoroadenosine-3'-phosphate
  modified_base 12: mod_base = OTHER; note = 2'-O-methylguanosine-3'-phosphate
  modified_base 13: mod_base = OTHER; note = 2'-O-methyladenosine-3'-phosphate
  modified_base 14: mod_base = OTHER; note = 2'-O-methylguanosine-3'-phosphate
  modified_base 15: mod_base = OTHER; note = 2'-O-methyladenosine-3'-phosphate
  modified_base 16: mod_base = OTHER; note = 2'-O-methylcytidine-3'-phosphate
  modified_base 17: mod_base = OTHER; note = 2'-O-methyluridine-3'-phosphate
  modified_base 18: mod_base = OTHER; note = 2'-O-methylguanosine-3'-phosphate
  modified_base 19: mod_base = OTHER; note = 2'-O-methylguanosine-3'-phosphate
  modified_base 20: mod_base = OTHER; note = 2'-O-methyluridine-3'-phosphate
  modified_base 21: mod_base = OTHER; note = 2'-O-methyluridine-3'-phosphate ((2S,4R)-1-[29-[[2-(acetylamino)-2-deoxy-beta-D-galactopyra nosyl]oxy]-14,14-bis[[3-[[3-[[5-[[2-(acetylamino)-2-deoxy-b eta-D-galactopyranosyl]oxy]-1-oxopentyl]amino]propyl]amino] -3-oxopropoxy]methyl]-1,12,19,25-tetraoxo-16-oxa-13,20,24-t riazanonacos-1-yl]-4-hydroxy-2-pyrrolidinyl)methyl ester
gcgattgtccagagactggtt

SEQ ID NO: 734 - RNA, 21 nt, synthetic construct
  source 1..21: mol_type = other RNA
  modified_base 1: mod_base = OTHER; note = 2'-O-methylcytidine-3'-phosphorothioate
  modified_base 2: mod_base = OTHER; note = 2'-O-methylguanosine-3'-phosphorothioate
  modified_base 3: mod_base = OTHER; note = 2'-O-methyladenosine-3'-phosphate
  modified_base 4: mod_base = OTHER; note = 2'-O-methyluridine-3'-phosphate
  modified_base 5: mod_base = OTHER; note = 2'-O-methyluridine-3'-phosphate
  modified_base 6: mod_base = OTHER; note = 2'-O-methylguanosine-3'-phosphate
  modified_base 7: mod_base = OTHER; note = 2'-deoxy-2'-fluorouridine-3'-phosphate
  modified_base 8: mod_base = OTHER; note = 2'-O-methylcytidine-3'-phosphate
  modified_base 9: mod_base = OTHER; note = 2'-deoxy-2'-fluorocytidine-3'-phosphate
  modified_base 10: mod_base = OTHER; note = 2'-deoxy-2'-fluoroadenosine-3'-phosphate
  modified_base 11: mod_base = OTHER; note = 2'-deoxy-2'-fluoroguanosine-3'-phosphate
  modified_base 12: mod_base = OTHER; note = 2'-O-methyladenosine-3'-phosphate
  modified_base 13: mod_base = OTHER; note = 2'-O-methylguanosine-3'-phosphate
  modified_base 14: mod_base = OTHER; note = 2'-O-methyladenosine-3'-phosphate
  modified_base 15: mod_base = OTHER; note = 2'-O-methylcytidine-3'-phosphate
  modified_base 16: mod_base = OTHER; note = 2'-O-methyluridine-3'-phosphate
  modified_base 17: mod_base = OTHER; note = 2'-O-methylguanosine-3'-phosphate
  modified_base 18: mod_base = OTHER; note = 2'-O-methylguanosine-3'-phosphate
  modified_base 19: mod_base = OTHER; note = 2'-O-methyluridine-3'-phosphate
  modified_base 20: mod_base = OTHER; note = 2'-O-methylguanosine-3'-phosphate
  modified_base 21: mod_base = OTHER; note = 2'-O-methyluridine-3'-phosphate ((2S,4R)-1-[29-[[2-(acetylamino)-2-deoxy-beta-D-galactopyra nosyl]oxy]-14,14-bis[[3-[[3-[[5-[[2-(acetylamino)-2-deoxy-b eta-D-galactopyranosyl]oxy]-1-oxopentyl]amino]propyl]amino] -3-oxopropoxy]methyl]-1,12,19,25-tetraoxo-16-oxa-13,20,24-t riazanonacos-1-yl]-4-hydroxy-2-pyrrolidinyl)methyl ester
cgattgtccagagactggtgt

SEQ ID NO: 735 - RNA, 21 nt, synthetic construct
  source 1..21: mol_type = other RNA
  modified_base 1: mod_base = OTHER; note = 2'-O-methylguanosine-3'-phosphorothioate
  modified_base 2: mod_base = OTHER; note = 2'-O-methyladenosine-3'-phosphorothioate
  modified_base 3: mod_base = OTHER; note = 2'-O-methyluridine-3'-phosphate
  modified_base 4: mod_base = OTHER; note = 2'-O-methyluridine-3'-phosphate
  modified_base 5: mod_base = OTHER; note = 2'-O-methylguanosine-3'-phosphate
  modified_base 6: mod_base = OTHER; note = 2'-O-methyluridine-3'-phosphate
  modified_base 7: mod_base = OTHER; note = 2'-deoxy-2'-fluorocytidine-3'-phosphate
  modified_base 8: mod_base = OTHER; note = 2'-O-methylcytidine-3'-phosphate
  modified_base 9: mod_base = OTHER; note = 2'-deoxy-2'-fluoroadenosine-3'-phosphate
  modified_base 10: mod_base = OTHER; note = 2'-deoxy-2'-fluoroguanosine-3'-phosphate
  modified_base 11: mod_base = OTHER; note = 2'-deoxy-2'-fluoroadenosine-3'-phosphate
  modified_base 12: mod_base = OTHER; note = 2'-O-methylguanosine-3'-phosphate
  modified_base 13: mod_base = OTHER; note = 2'-O-methyladenosine-3'-phosphate
  modified_base 14: mod_base = OTHER; note = 2'-O-methylcytidine-3'-phosphate
  modified_base 15: mod_base = OTHER; note = 2'-O-methyluridine-3'-phosphate
  modified_base 16: mod_base = OTHER; note = 2'-O-methylguanosine-3'-phosphate
  modified_base 17: mod_base = OTHER; note = 2'-O-methylguanosine-3'-phosphate
  modified_base 18: mod_base = OTHER; note = 2'-O-methyluridine-3'-phosphate
  modified_base 19: mod_base = OTHER; note = 2'-O-methylguanosine-3'-phosphate
  modified_base 20: mod_base = OTHER; note = 2'-O-methyladenosine-3'-phosphate
  modified_base 21: mod_base = OTHER; note = 2'-O-methyluridine-3'-phosphate ((2S,4R)-1-[29-[[2-(acetylamino)-2-deoxy-beta-D-galactopyra nosyl]oxy]-14,14-bis[[3-[[3-[[5-[[2-(acetylamino)-2-deoxy-b eta-D-galactopyranosyl]oxy]-1-oxopentyl]amino]propyl]amino] -3-oxopropoxy]methyl]-1,12,19,25-tetraoxo-16-oxa-13,20,24-t riazanonacos-1-yl]-4-hydroxy-2-pyrrolidinyl)methyl ester
gattgtccagagactggtgat

SEQ ID NO: 736 - RNA, 21 nt, synthetic construct
  source 1..21: mol_type = other RNA
  modified_base 1: mod_base = OTHER; note = 2'-O-methyluridine-3'-phosphorothioate
  modified_base 2: mod_base = OTHER; note = 2'-O-methylguanosine-3'-phosphorothioate
  modified_base 3: mod_base = OTHER; note = 2'-O-methyluridine-3'-phosphate
  modified_base 4: mod_base = OTHER; note = 2'-O-methylcytidine-3'-phosphate
  modified_base 5: mod_base = OTHER; note = 2'-O-methylcytidine-3'-phosphate
  modified_base 6: mod_base = OTHER; note = 2'-O-methyladenosine-3'-phosphate
  modified_base 7: mod_base = OTHER; note = 2'-deoxy-2'-fluoroguanosine-3'-phosphate
  modified_base 8: mod_base = OTHER; note = 2'-O-methyladenosine-3'-phosphate
  modified_base 9: mod_base = OTHER; note = 2'-deoxy-2'-fluoroguanosine-3'-phosphate
  modified_base 10: mod_base = OTHER; note = 2'-deoxy-2'-fluoroadenosine-3'-phosphate
  modified_base 11: mod_base = OTHER; note = 2'-deoxy-2'-fluorocytidine-3'-phosphate
  modified_base 12: mod_base = OTHER; note = 2'-O-methyluridine-3'-phosphate
  modified_base 13: mod_base = OTHER; note = 2'-O-methylguanosine-3'-phosphate
  modified_base 14: mod_base = OTHER; note = 2'-O-methylguanosine-3'-phosphate
  modified_base 15: mod_base = OTHER; note = 2'-O-methyluridine-3'-phosphate
  modified_base 16: mod_base = OTHER; note = 2'-O-methylguanosine-3'-phosphate
  modified_base 17: mod_base = OTHER; note = 2'-O-methyladenosine-3'-phosphate
  modified_base 18: mod_base = OTHER; note = 2'-O-methylcytidine-3'-phosphate
  modified_base 19: mod_base = OTHER; note = 2'-O-methyladenosine-3'-phosphate
  modified_base 20: mod_base = OTHER; note = 2'-O-methyluridine-3'-phosphate
  modified_base 21: mod_base = OTHER; note = 2'-O-methyluridine-3'-phosphate ((2S,4R)-1-[29-[[2-(acetylamino)-2-deoxy-beta-D-galactopyra nosyl]oxy]-14,14-bis[[3-[[3-[[5-[[2-(acetylamino)-2-deoxy-b eta-D-galactopyranosyl]oxy]-1-oxopentyl]amino]propyl]amino] -3-oxopropoxy]methyl]-1,12,19,25-tetraoxo-16-oxa-13,20,24-t riazanonacos-1-yl]-4-hydroxy-2-pyrrolidinyl)methyl ester
tgtccagagactggtgacatt

SEQ ID NO: 737 - RNA, 21 nt, synthetic construct
  source 1..21: mol_type = other RNA
  modified_base 1: mod_base = OTHER; note = 2'-O-methylcytidine-3'-phosphorothioate
  modified_base 2: mod_base = OTHER; note = 2'-O-methyladenosine-3'-phosphorothioate
  modified_base 3: mod_base = OTHER; note = 2'-O-methylguanosine-3'-phosphate
  modified_base 4: mod_base = OTHER; note = 2'-O-methyladenosine-3'-phosphate
  modified_base 5: mod_base = OTHER; note = 2'-O-methylguanosine-3'-phosphate
  modified_base 6: mod_base = OTHER; note = 2'-O-methyladenosine-3'-phosphate
  modified_base 7: mod_base = OTHER; note = 2'-deoxy-2'-fluorocytidine-3'-phosphate
  modified_base 8: mod_base = OTHER; note = 2'-O-methyluridine-3'-phosphate
  modified_base 9: mod_base = OTHER; note = 2'-deoxy-2'-fluoroguanosine-3'-phosphate
  modified_base 10: mod_base = OTHER; note = 2'-deoxy-2'-fluoroguanosine-3'-phosphate
  modified_base 11: mod_base = OTHER; note = 2'-deoxy-2'-fluorouridine-3'-phosphate
  modified_base 12: mod_base = OTHER; note = 2'-O-methylguanosine-3'-phosphate
  modified_base 13: mod_base = OTHER; note = 2'-O-methyladenosine-3'-phosphate
  modified_base 14: mod_base = OTHER; note = 2'-O-methylcytidine-3'-phosphate
  modified_base 15: mod_base = OTHER; note = 2'-O-methyladenosine-3'-phosphate
  modified_base 16: mod_base = OTHER; note = 2'-O-methyluridine-3'-phosphate
  modified_base 17: mod_base = OTHER; note = 2'-O-methylguanosine-3'-phosphate
  modified_base 18: mod_base = OTHER; note = 2'-O-methylguanosine-3'-phosphate
  modified_base 19: mod_base = OTHER; note = 2'-O-methylcytidine-3'-phosphate
  modified_base 20: mod_base = OTHER; note = 2'-O-methyluridine-3'-phosphate
  modified_base 21: mod_base = OTHER; note = 2'-O-methyluridine-3'-phosphate ((2S,4R)-1-[29-[[2-(acetylamino)-2-deoxy-beta-D-galactopyra nosyl]oxy]-14,14-bis[[3-[[3-[[5-[[2-(acetylamino)-2-deoxy-b eta-D-galactopyranosyl]oxy]-1-oxopentyl]amino]propyl]amino] -3-oxopropoxy]methyl]-1,12,19,25-tetraoxo-16-oxa-13,20,24-t riazanonacos-1-yl]-4-hydroxy-2-pyrrolidinyl)methyl ester
cagagactggtgacatggctt

SEQ ID NO: 738 - RNA, 21 nt, synthetic construct
  source 1..21: mol_type = other RNA
  modified_base 1: mod_base = OTHER; note = 2'-O-methyladenosine-3'-phosphorothioate
  modified_base 2: mod_base = OTHER; note = 2'-O-methylguanosine-3'-phosphorothioate
  modified_base 3: mod_base = OTHER; note = 2'-O-methyladenosine-3'-phosphate
  modified_base 4: mod_base = OTHER; note = 2'-O-methylguanosine-3'-phosphate
  modified_base 5: mod_base = OTHER; note = 2'-O-methyladenosine-3'-phosphate
  modified_base 6: mod_base = OTHER; note = 2'-O-methylcytidine-3'-phosphate
  modified_base 7: mod_base = OTHER; note = 2'-deoxy-2'-fluorouridine-3'-phosphate
  modified_base 8: mod_base = OTHER; note = 2'-O-methylguanosine-3'-phosphate
  modified_base 9: mod_base = OTHER; note = 2'-deoxy-2'-fluoroguanosine-3'-phosphate
  modified_base 10: mod_base = OTHER; note = 2'-deoxy-2'-fluorouridine-3'-phosphate
  modified_base 11: mod_base = OTHER; note = 2'-deoxy-2'-fluoroguanosine-3'-phosphate
  modified_base 12: mod_base = OTHER; note = 2'-O-methyladenosine-3'-phosphate
  modified_base 13: mod_base = OTHER; note = 2'-O-methylcytidine-3'-phosphate
  modified_base 14: mod_base = OTHER; note = 2'-O-methyladenosine-3'-phosphate
  modified_base 15: mod_base = OTHER; note = 2'-O-methyluridine-3'-phosphate
  modified_base 16: mod_base = OTHER; note = 2'-O-methylguanosine-3'-phosphate
  modified_base 17: mod_base = OTHER; note = 2'-O-methylguanosine-3'-phosphate
  modified_base 18: mod_base = OTHER; note = 2'-O-methylcytidine-3'-phosphate
  modified_base 19: mod_base = OTHER; note = 2'-O-methyluridine-3'-phosphate
  modified_base 20: mod_base = OTHER; note = 2'-O-methyluridine-3'-phosphate
  modified_base 21: mod_base = OTHER; note = 2'-O-methyluridine-3'-phosphate ((2S,4R)-1-[29-[[2-(acetylamino)-2-deoxy-beta-D-galactopyra nosyl]oxy]-14,14-bis[[3-[[3-[[5-[[2-(acetylamino)-2-deoxy-b eta-D-galactopyranosyl]oxy]-1-oxopentyl]amino]propyl]amino] -3-oxopropoxy]methyl]-1,12,19,25-tetraoxo-16-oxa-13,20,24-t riazanonacos-1-yl]-4-hydroxy-2-pyrrolidinyl)methyl ester
agagactggtgacatggcttt

SEQ ID NO: 739 - RNA, 21 nt, synthetic construct
  source 1..21: mol_type = other RNA
  modified_base 1: mod_base = OTHER; note = 2'-O-methyladenosine-3'-phosphorothioate
  modified_base 2: mod_base = OTHER; note = 2'-O-methylcytidine-3'-phosphorothioate
  modified_base 3: mod_base = OTHER; note = 2'-O-methyluridine-3'-phosphate
  modified_base 4: mod_base = OTHER; note = 2'-O-methylguanosine-3'-phosphate
  modified_base 5: mod_base = OTHER; note = 2'-O-methylguanosine-3'-phosphate
  modified_base 6: mod_base = OTHER; note = 2'-O-methyluridine-3'-phosphate
  modified_base 7: mod_base = OTHER; note = 2'-deoxy-2'-fluoroguanosine-3'-phosphate
  modified_base 8: mod_base = OTHER; note = 2'-O-methyladenosine-3'-phosphate
  modified_base 9: mod_base = OTHER; note = 2'-deoxy-2'-fluorocytidine-3'-phosphate
  modified_base 10: mod_base = OTHER; note = 2'-deoxy-2'-fluoroadenosine-3'-phosphate
  modified_base 11: mod_base = OTHER; note = 2'-deoxy-2'-fluorouridine-3'-phosphate
  modified_base 12: mod_base = OTHER; note = 2'-O-methylguanosine-3'-phosphate
  modified_base 13: mod_base = OTHER; note = 2'-O-methylguanosine-3'-phosphate
  modified_base 14: mod_base = OTHER; note = 2'-O-methylcytidine-3'-phosphate
  modified_base 15: mod_base = OTHER; note = 2'-O-methyluridine-3'-phosphate
  modified_base 16: mod_base = OTHER; note = 2'-O-methyluridine-3'-phosphate
  modified_base 17: mod_base = OTHER; note = 2'-O-methylcytidine-3'-phosphate
  modified_base 18: mod_base = OTHER; note = 2'-O-methylcytidine-3'-phosphate
  modified_base 19: mod_base = OTHER; note = 2'-O-methyladenosine-3'-phosphate
  modified_base 20: mod_base = OTHER; note = 2'-O-methylguanosine-3'-phosphate
  modified_base 21: mod_base = OTHER; note = 2'-O-methyluridine-3'-phosphate ((2S,4R)-1-[29-[[2-(acetylamino)-2-deoxy-beta-D-galactopyra nosyl]oxy]-14,14-bis[[3-[[3-[[5-[[2-(acetylamino)-2-deoxy-b eta-D-galactopyranosyl]oxy]-1-oxopentyl]amino]propyl]amino] -3-oxopropoxy]methyl]-1,12,19,25-tetraoxo-16-oxa-13,20,24-t riazanonacos-1-yl]-4-hydroxy-2-pyrrolidinyl)methyl ester
actggtgacatggcttccagt

SEQ ID NO: 740 - RNA, 21 nt, synthetic construct
  source 1..21: mol_type = other RNA
  modified_base 1: mod_base = OTHER; note = 2'-O-methylcytidine-3'-phosphorothioate
  modified_base 2: mod_base = OTHER; note = 2'-O-methyluridine-3'-phosphorothioate
  modified_base 3: mod_base = OTHER; note = 2'-O-methylguanosine-3'-phosphate
  modified_base 4: mod_base = OTHER; note = 2'-O-methylguanosine-3'-phosphate
  modified_base 5: mod_base = OTHER; note = 2'-O-methyluridine-3'-phosphate
  modified_base 6: mod_base = OTHER; note = 2'-O-methylguanosine-3'-phosphate
  modified_base 7: mod_base = OTHER; note = 2'-deoxy-2'-fluoroadenosine-3'-phosphate
  modified_base 8: mod_base = OTHER; note = 2'-O-methylcytidine-3'-phosphate
  modified_base 9: mod_base = OTHER; note = 2'-deoxy-2'-fluoroadenosine-3'-phosphate
  modified_base 10: mod_base = OTHER; note = 2'-deoxy-2'-fluorouridine-3'-phosphate
  modified_base 11: mod_base = OTHER; note = 2'-deoxy-2'-fluoroguanosine-3'-phosphate
  modified_base 12: mod_base = OTHER; note = 2'-O-methylguanosine-3'-phosphate
  modified_base 13: mod_base = OTHER; note = 2'-O-methylcytidine-3'-phosphate
  modified_base 14: mod_base = OTHER; note = 2'-O-methyluridine-3'-phosphate
  modified_base 15: mod_base = OTHER; note = 2'-O-methyluridine-3'-phosphate
  modified_base 16: mod_base = OTHER; note = 2'-O-methylcytidine-3'-phosphate
  modified_base 17: mod_base = OTHER; note = 2'-O-methylcytidine-3'-phosphate
  modified_base 18: mod_base = OTHER; note = 2'-O-methyladenosine-3'-phosphate
  modified_base 19: mod_base = OTHER; note = 2'-O-methylguanosine-3'-phosphate
  modified_base 20: mod_base = OTHER; note = 2'-O-methyladenosine-3'-phosphate
  modified_base 21: mod_base = OTHER; note = 2'-O-methyluridine-3'-phosphate ((2S,4R)-1-[29-[[2-(acetylamino)-2-deoxy-beta-D-galactopyra nosyl]oxy]-14,14-bis[[3-[[3-[[5-[[2-(acetylamino)-2-deoxy-b eta-D-galactopyranosyl]oxy]-1-oxopentyl]amino]propyl]amino] -3-oxopropoxy]methyl]-1,12,19,25-tetraoxo-16-oxa-13,20,24-t riazanonacos-1-yl]-4-hydroxy-2-pyrrolidinyl)methyl ester
ctggtgacatggcttccagat

SEQ ID NO: 741 - RNA, 21 nt, synthetic construct
  source 1..21: mol_type = other RNA
  modified_base 1: mod_base = OTHER; note = 2'-O-methylguanosine-3'-phosphorothioate
  modified_base 2: mod_base = OTHER; note = 2'-O-methyluridine-3'-phosphorothioate
  modified_base 3: mod_base = OTHER; note = 2'-O-methylguanosine-3'-phosphate
  modified_base 4: mod_base = OTHER; note = 2'-O-methyladenosine-3'-phosphate
  modified_base 5: mod_base = OTHER; note = 2'-O-methylcytidine-3'-phosphate
  modified_base 6: mod_base = OTHER; note = 2'-O-methyladenosine-3'-phosphate
  modified_base 7: mod_base = OTHER; note = 2'-deoxy-2'-fluorouridine-3'-phosphate
  modified_base 8: mod_base = OTHER; note = 2'-O-methylguanosine-3'-phosphate
  modified_base 9: mod_base = OTHER; note = 2'-deoxy-2'-fluoroguanosine-3'-phosphate
  modified_base 10: mod_base = OTHER; note = 2'-deoxy-2'-fluorocytidine-3'-phosphate
  modified_base 11: mod_base = OTHER; note = 2'-deoxy-2'-fluorouridine-3'-phosphate
  modified_base 12: mod_base = OTHER; note = 2'-O-methyluridine-3'-phosphate
  modified_base 13: mod_base = OTHER; note = 2'-O-methylcytidine-3'-phosphate
  modified_base 14: mod_base = OTHER; note = 2'-O-methylcytidine-3'-phosphate
  modified_base 15: mod_base = OTHER; note = 2'-O-methyladenosine-3'-phosphate
  modified_base 16: mod_base = OTHER; note = 2'-O-methylguanosine-3'-phosphate
  modified_base 17: mod_base = OTHER; note = 2'-O-methyladenosine-3'-phosphate
  modified_base 18: mod_base = OTHER; note = 2'-O-methyluridine-3'-phosphate
  modified_base 19: mod_base = OTHER; note = 2'-O-methyladenosine-3'-phosphate
  modified_base 20: mod_base = OTHER; note = 2'-O-methyluridine-3'-phosphate
  modified_base 21: mod_base = OTHER; note = 2'-O-methyluridine-3'-phosphate ((2S,4R)-1-[29-[[2-(acetylamino)-2-deoxy-beta-D-galactopyra nosyl]oxy]-14,14-bis[[3-[[3-[[5-[[2-(acetylamino)-2-deoxy-b eta-D-galactopyranosyl]oxy]-1-oxopentyl]amino]propyl]amino] -3-oxopropoxy]methyl]-1,12,19,25-tetraoxo-16-oxa-13,20,24-t riazanonacos-1-yl]-4-hydroxy-2-pyrrolidinyl)methyl ester
gtgacatggcttccagatatt

SEQ ID NO: 742 - RNA, 21 nt, synthetic construct
  source 1..21: mol_type = other RNA
  modified_base 1: mod_base = OTHER; note = 2'-O-methyluridine-3'-phosphorothioate
  modified_base 2: mod_base = OTHER; note = 2'-O-methylguanosine-3'-phosphorothioate
  modified_base 3: mod_base = OTHER; note = 2'-O-methyladenosine-3'-phosphate
  modified_base 4: mod_base = OTHER; note = 2'-O-methylcytidine-3'-phosphate
  modified_base 5: mod_base = OTHER; note = 2'-O-methyladenosine-3'-phosphate
  modified_base 6: mod_base = OTHER; note = 2'-O-methyluridine-3'-phosphate
  modified_base 7: mod_base = OTHER; note = 2'-deoxy-2'-fluoroguanosine-3'-phosphate
  modified_base 8: mod_base = OTHER; note = 2'-O-methylguanosine-3'-phosphate
  modified_base 9: mod_base = OTHER; note = 2'-deoxy-2'-fluorocytidine-3'-phosphate
  modified_base 10: mod_base = OTHER; note = 2'-deoxy-2'-fluorouridine-3'-phosphate
  modified_base 11: mod_base = OTHER; note = 2'-deoxy-2'-fluorouridine-3'-phosphate
  modified_base 12: mod_base = OTHER; note = 2'-O-methylcytidine-3'-phosphate
  modified_base 13: mod_base = OTHER; note = 2'-O-methylcytidine-3'-phosphate
  modified_base 14: mod_base = OTHER; note = 2'-O-methyladenosine-3'-phosphate
  modified_base 15: mod_base = OTHER; note = 2'-O-methylguanosine-3'-phosphate
  modified_base 16: mod_base = OTHER; note = 2'-O-methyladenosine-3'-phosphate
  modified_base 17: mod_base = OTHER; note = 2'-O-methyluridine-3'-phosphate
  modified_base 18: mod_base = OTHER; note = 2'-O-methyladenosine-3'-phosphate
  modified_base 19: mod_base = OTHER; note = 2'-O-methyluridine-3'-phosphate
  modified_base 20: mod_base = OTHER; note = 2'-O-methylguanosine-3'-phosphate
  modified_base 21: mod_base = OTHER; note = 2'-O-methyluridine-3'-phosphate ((2S,4R)-1-[29-[[2-(acetylamino)-2-deoxy-beta-D-galactopyra nosyl]oxy]-14,14-bis[[3-[[3-[[5-[[2-(acetylamino)-2-deoxy-b eta-D-galactopyranosyl]oxy]-1-oxopentyl]amino]propyl]amino] -3-oxopropoxy]methyl]-1,12,19,25-tetraoxo-16-oxa-13,20,24-t riazanonacos-1-yl]-4-hydroxy-2-pyrrolidinyl)methyl ester
tgacatggcttccagatatgt

SEQ ID NO: 743 - RNA, 21 nt, synthetic construct
  source 1..21: mol_type = other RNA
  modified_base 1: mod_base = OTHER; note = 2'-O-methylguanosine-3'-phosphorothioate
  modified_base 2: mod_base = OTHER; note = 2'-O-methyladenosine-3'-phosphorothioate
  modified_base 3: mod_base = OTHER; note = 2'-O-methylcytidine-3'-phosphate
  modified_base 4: mod_base = OTHER; note = 2'-O-methyladenosine-3'-phosphate
  modified_base 5: mod_base = OTHER; note = 2'-O-methyluridine-3'-phosphate
  modified_base 6: mod_base = OTHER; note = 2'-O-methylguanosine-3'-phosphate
  modified_base 7: mod_base = OTHER; note = 2'-deoxy-2'-fluoroguanosine-3'-phosphate
  modified_base 8: mod_base = OTHER; note = 2'-O-methylcytidine-3'-phosphate
  modified_base 9: mod_base = OTHER; note = 2'-deoxy-2'-fluorouridine-3'-phosphate
  modified_base 10: mod_base = OTHER; note = 2'-deoxy-2'-fluorouridine-3'-phosphate
  modified_base 11: mod_base = OTHER; note = 2'-deoxy-2'-fluorocytidine-3'-phosphate
  modified_base 12: mod_base = OTHER; note = 2'-O-methylcytidine-3'-phosphate
  modified_base 13: mod_base = OTHER; note = 2'-O-methyladenosine-3'-phosphate
  modified_base 14: mod_base = OTHER; note = 2'-O-methylguanosine-3'-phosphate
  modified_base 15: mod_base = OTHER; note = 2'-O-methyladenosine-3'-phosphate
  modified_base 16: mod_base = OTHER; note = 2'-O-methyluridine-3'-phosphate
  modified_base 17: mod_base = OTHER; note = 2'-O-methyladenosine-3'-phosphate
  modified_base 18: mod_base = OTHER; note = 2'-O-methyluridine-3'-phosphate
  modified_base 19: mod_base = OTHER; note = 2'-O-methylguanosine-3'-phosphate
  modified_base 20: mod_base = OTHER; note = 2'-O-methylcytidine-3'-phosphate
  modified_base 21: mod_base = OTHER; note = 2'-O-methyluridine-3'-phosphate ((2S,4R)-1-[29-[[2-(acetylamino)-2-deoxy-beta-D-galactopyra nosyl]oxy]-14,14-bis[[3-[[3-[[5-[[2-(acetylamino)-2-deoxy-b eta-D-galactopyranosyl]oxy]-1-oxopentyl]amino]propyl]amino] -3-oxopropoxy]methyl]-1,12,19,25-tetraoxo-16-oxa-13,20,24-t riazanonacos-1-yl]-4-hydroxy-2-pyrrolidinyl)methyl ester
gacatggcttccagatatgct

SEQ ID NO: 744 - RNA, 21 nt, synthetic construct
  source 1..21: mol_type = other RNA
  modified_base 1: mod_base = OTHER; note = 2'-O-methyladenosine-3'-phosphorothioate
  modified_base 2: mod_base = OTHER; note = 2'-O-methylcytidine-3'-phosphorothioate
  modified_base 3: mod_base = OTHER; note = 2'-O-methyladenosine-3'-phosphate
  modified_base 4: mod_base = OTHER; note = 2'-O-methyluridine-3'-phosphate
  modified_base 5: mod_base = OTHER; note = 2'-O-methylguanosine-3'-phosphate
  modified_base 6: mod_base = OTHER; note = 2'-O-methylguanosine-3'-phosphate
  modified_base 7: mod_base = OTHER; note = 2'-deoxy-2'-fluorocytidine-3'-phosphate
  modified_base 8: mod_base = OTHER; note = 2'-O-methyluridine-3'-phosphate
  modified_base 9: mod_base = OTHER; note = 2'-deoxy-2'-fluorouridine-3'-phosphate
  modified_base 10: mod_base = OTHER; note = 2'-deoxy-2'-fluorocytidine-3'-phosphate
  modified_base 11: mod_base = OTHER; note = 2'-deoxy-2'-fluorocytidine-3'-phosphate
  modified_base 12: mod_base = OTHER; note = 2'-O-methyladenosine-3'-phosphate
  modified_base 13: mod_base = OTHER; note = 2'-O-methylguanosine-3'-phosphate
  modified_base 14: mod_base = OTHER; note = 2'-O-methyladenosine-3'-phosphate
  modified_base 15: mod_base = OTHER; note = 2'-O-methyluridine-3'-phosphate
  modified_base 16: mod_base = OTHER; note = 2'-O-methyladenosine-3'-phosphate
  modified_base 17: mod_base = OTHER; note = 2'-O-methyluridine-3'-phosphate
  modified_base 18: mod_base = OTHER; note = 2'-O-methylguanosine-3'-phosphate
  modified_base 19: mod_base = OTHER; note = 2'-O-methylcytidine-3'-phosphate
  modified_base 20: mod_base = OTHER; note = 2'-O-methylcytidine-3'-phosphate
  modified_base 21: mod_base = OTHER; note = 2'-O-methyluridine-3'-phosphate ((2S,4R)-1-[29-[[2-(acetylamino)-2-deoxy-beta-D-galactopyra nosyl]oxy]-14,14-bis[[3-[[3-[[5-[[2-(acetylamino)-2-deoxy-b eta-D-galactopyranosyl]oxy]-1-oxopentyl]amino]propyl]amino] -3-oxopropoxy]methyl]-1,12,19,25-tetraoxo-16-oxa-13,20,24-t riazanonacos-1-yl]-4-hydroxy-2-pyrrolidinyl)methyl ester
acatggcttccagatatgcct

SEQ ID NO: 745 - RNA, 21 nt, synthetic construct
  source 1..21: mol_type = other RNA
  modified_base 1: mod_base = OTHER; note = 2'-O-methylcytidine-3'-phosphorothioate
  modified_base 2: mod_base = OTHER; note = 2'-O-methyladenosine-3'-phosphorothioate
  modified_base 3: mod_base = OTHER; note = 2'-O-methyluridine-3'-phosphate
  modified_base 4: mod_base = OTHER; note = 2'-O-methylguanosine-3'-phosphate
  modified_base 5: mod_base = OTHER; note = 2'-O-methylguanosine-3'-phosphate
  modified_base 6: mod_base = OTHER; note = 2'-O-methylcytidine-3'-phosphate
  modified_base 7: mod_base = OTHER; note = 2'-deoxy-2'-fluorouridine-3'-phosphate
  modified_base 8: mod_base = OTHER; note = 2'-O-methyluridine-3'-phosphate
  modified_base 9: mod_base = OTHER; note = 2'-deoxy-2'-fluorocytidine-3'-phosphate
  modified_base 10: mod_base = OTHER; note = 2'-deoxy-2'-fluorocytidine-3'-phosphate
  modified_base 11: mod_base = OTHER; note = 2'-deoxy-2'-fluoroadenosine-3'-phosphate
  modified_base 12: mod_base = OTHER; note = 2'-O-methylguanosine-3'-phosphate
  modified_base 13: mod_base = OTHER; note = 2'-O-methyladenosine-3'-phosphate
  modified_base 14: mod_base = OTHER; note = 2'-O-methyluridine-3'-phosphate
  modified_base 15: mod_base = OTHER; note = 2'-O-methyladenosine-3'-phosphate
  modified_base 16: mod_base = OTHER; note = 2'-O-methyluridine-3'-phosphate
  modified_base 17: mod_base = OTHER; note = 2'-O-methylguanosine-3'-phosphate
  modified_base 18: mod_base = OTHER; note = 2'-O-methylcytidine-3'-phosphate
  modified_base 19: mod_base = OTHER; note = 2'-O-methylcytidine-3'-phosphate
  modified_base 20: mod_base = OTHER; note = 2'-O-methylcytidine-3'-phosphate
  modified_base 21: mod_base = OTHER; note = 2'-O-methyluridine-3'-phosphate ((2S,4R)-1-[29-[[2-(acetylamino)-2-deoxy-beta-D-galactopyra nosyl]oxy]-14,14-bis[[3-[[3-[[5-[[2-(acetylamino)-2-deoxy-b eta-D-galactopyranosyl]oxy]-1-oxopentyl]amino]propyl]amino] -3-oxopropoxy]methyl]-1,12,19,25-tetraoxo-16-oxa-13,20,24-t riazanonacos-1-yl]-4-hydroxy-2-pyrrolidinyl)methyl ester
catggcttccagatatgccct

SEQ ID NO: 746 - RNA, 21 nt, synthetic construct
  source 1..21: mol_type = other RNA
  modified_base 1: mod_base = OTHER; note = 2'-O-methyladenosine-3'-phosphorothioate
  modified_base 2: mod_base = OTHER; note = 2'-O-methyluridine-3'-phosphorothioate
  modified_base 3: mod_base = OTHER; note = 2'-O-methylguanosine-3'-phosphate
  modified_base 4: mod_base = OTHER; note = 2'-O-methylguanosine-3'-phosphate
  modified_base 5: mod_base = OTHER; note = 2'-O-methylcytidine-3'-phosphate
  modified_base 6: mod_base = OTHER; note = 2'-O-methyluridine-3'-phosphate
  modified_base 7: mod_base = OTHER; note = 2'-deoxy-2'-fluorouridine-3'-phosphate
  modified_base 8: mod_base = OTHER; note = 2'-O-methylcytidine-3'-phosphate
  modified_base 9: mod_base = OTHER; note = 2'-deoxy-2'-fluorocytidine-3'-phosphate
  modified_base 10: mod_base = OTHER; note = 2'-deoxy-2'-fluoroadenosine-3'-phosphate
  modified_base 11: mod_base = OTHER; note = 2'-deoxy-2'-fluoroguanosine-3'-phosphate
  modified_base 12: mod_base = OTHER; note = 2'-O-methyladenosine-3'-phosphate
  modified_base 13: mod_base = OTHER; note = 2'-O-methyluridine-3'-phosphate
  modified_base 14: mod_base = OTHER; note = 2'-O-methyladenosine-3'-phosphate
  modified_base 15: mod_base = OTHER; note = 2'-O-methyluridine-3'-phosphate
  modified_base 16: mod_base = OTHER; note = 2'-O-methylguanosine-3'-phosphate
  modified_base 17: mod_base = OTHER; note = 2'-O-methylcytidine-3'-phosphate
  modified_base 18: mod_base = OTHER; note = 2'-O-methylcytidine-3'-phosphate
  modified_base 19: mod_base = OTHER; note = 2'-O-methylcytidine-3'-phosphate
  modified_base 20: mod_base = OTHER; note = 2'-O-methylguanosine-3'-phosphate
  modified_base 21: mod_base = OTHER; note = 2'-O-methyluridine-3'-phosphate ((2S,4R)-1-[29-[[2-(acetylamino)-2-deoxy-beta-D-galactopyra nosyl]oxy]-14,14-bis[[3-[[3-[[5-[[2-(acetylamino)-2-deoxy-b eta-D-galactopyranosyl]oxy]-1-oxopentyl]amino]propyl]amino] -3-oxopropoxy]methyl]-1,12,19,25-tetraoxo-16-oxa-13,20,24-t riazanonacos-1-yl]-4-hydroxy-2-pyrrolidinyl)methyl ester
atggcttccagatatgcccgt

SEQ ID NO: 747 - RNA, 21 nt, synthetic construct
  source 1..21: mol_type = other RNA
  modified_base 1: mod_base = OTHER; note = 2'-O-methylguanosine-3'-phosphorothioate
  modified_base 2: mod_base = OTHER; note = 2'-O-methylcytidine-3'-phosphorothioate
  modified_base 3: mod_base = OTHER; note = 2'-O-methyluridine-3'-phosphate
  modified_base 4: mod_base = OTHER; note = 2'-O-methyluridine-3'-phosphate
  modified_base 5: mod_base = OTHER; note = 2'-O-methylcytidine-3'-phosphate
  modified_base 6: mod_base = OTHER; note = 2'-O-methylcytidine-3'-phosphate
  modified_base 7: mod_base = OTHER; note = 2'-deoxy-2'-fluoroadenosine-3'-phosphate
  modified_base 8: mod_base = OTHER; note = 2'-O-methylguanosine-3'-phosphate
  modified_base 9: mod_base = OTHER; note = 2'-deoxy-2'-fluoroadenosine-3'-phosphate
  modified_base 10: mod_base = OTHER; note = 2'-deoxy-2'-fluorouridine-3'-phosphate
  modified_base 11: mod_base = OTHER; note = 2'-deoxy-2'-fluoroadenosine-3'-phosphate
  modified_base 12: mod_base = OTHER; note = 2'-O-methyluridine-3'-phosphate
  modified_base 13: mod_base = OTHER; note = 2'-O-methylguanosine-3'-phosphate
  modified_base 14: mod_base = OTHER; note = 2'-O-methylcytidine-3'-phosphate
  modified_base 15: mod_base = OTHER; note = 2'-O-methylcytidine-3'-phosphate
  modified_base 16: mod_base = OTHER; note = 2'-O-methylcytidine-3'-phosphate
  modified_base 17: mod_base = OTHER; note = 2'-O-methylguanosine-3'-phosphate
  modified_base 18: mod_base = OTHER; note = 2'-O-methyladenosine-3'-phosphate
  modified_base 19: mod_base = OTHER; note = 2'-O-methylcytidine-3'-phosphate
  modified_base 20: mod_base = OTHER; note = 2'-O-methylguanosine-3'-phosphate
  modified_base 21: mod_base = OTHER; note = 2'-O-methyluridine-3'-phosphate ((2S,4R)-1-[29-[[2-(acetylamino)-2-deoxy-beta-D-galactopyra nosyl]oxy]-14,14-bis[[3-[[3-[[5-[[2-(acetylamino)-2-deoxy-b eta-D-galactopyranosyl]oxy]-1-oxopentyl]amino]propyl]amino] -3-oxopropoxy]methyl]-1,12,19,25-tetraoxo-16-oxa-13,20,24-t riazanonacos-1-yl]-4-hydroxy-2-pyrrolidinyl)methyl ester
gcttccagatatgcccgacgt

SEQ ID NO: 748 - RNA, 21 nt, synthetic construct
  source 1..21: mol_type = other RNA
  modified_base 1: mod_base = OTHER; note = 2'-O-methylguanosine-3'-phosphorothioate
  modified_base 2: mod_base = OTHER; note = 2'-O-methylcytidine-3'-phosphorothioate
  modified_base 3: mod_base = OTHER; note = 2'-O-methyladenosine-3'-phosphate
  modified_base 4: mod_base = OTHER; note = 2'-O-methylguanosine-3'-phosphate
  modified_base 5: mod_base = OTHER; note = 2'-O-methyluridine-3'-phosphate
  modified_base 6: mod_base = OTHER; note = 2'-O-methylguanosine-3'-phosphate
  modified_base 7: mod_base = OTHER; note = 2'-deoxy-2'-fluoroguanosine-3'-phosphate
  modified_base 8: mod_base = OTHER; note = 2'-O-methylguanosine-3'-phosphate
  modified_base 9: mod_base = OTHER; note = 2'-deoxy-2'-fluorouridine-3'-phosphate
  modified_base 10: mod_base = OTHER; note = 2'-deoxy-2'-fluoroguanosine-3'-phosphate
  modified_base 11: mod_base = OTHER; note = 2'-deoxy-2'-fluoroadenosine-3'-phosphate
  modified_base 12: mod_base = OTHER; note = 2'-O-methylcytidine-3'-phosphate
  modified_base 13: mod_base = OTHER; note = 2'-O-methylcytidine-3'-phosphate
  modified_base 14: mod_base = OTHER; note = 2'-O-methyluridine-3'-phosphate
  modified_base 15: mod_base = OTHER; note = 2'-O-methylcytidine-3'-phosphate
  modified_base 16: mod_base = OTHER; note = 2'-O-methyladenosine-3'-phosphate
  modified_base 17: mod_base = OTHER; note = 2'-O-methylcytidine-3'-phosphate
  modified_base 18: mod_base = OTHER; note = 2'-O-methyladenosine-3'-phosphate
  modified_base 19: mod_base = OTHER; note = 2'-O-methylguanosine-3'-phosphate
  modified_base 20: mod_base = OTHER; note = 2'-O-methylguanosine-3'-phosphate
  modified_base 21: mod_base = OTHER; note = 2'-O-methyluridine-3'-phosphate ((2S,4R)-1-[29-[[2-(acetylamino)-2-deoxy-beta-D-galactopyra nosyl]oxy]-14,14-bis[[3-[[3-[[5-[[2-(acetylamino)-2-deoxy-b eta-D-galactopyranosyl]oxy]-1-oxopentyl]amino]propyl]amino] -3-oxopropoxy]methyl]-1,12,19,25-tetraoxo-16-oxa-13,20,24-t riazanonacos-1-yl]-4-hydroxy-2-pyrrolidinyl)methyl ester
gcagtgggtgacctcacaggt

SEQ ID NO: 749 - RNA, 21 nt, synthetic construct
  source 1..21: mol_type = other RNA
  modified_base 1: mod_base = OTHER; note = 2'-O-methylcytidine-3'-phosphorothioate
  modified_base 2: mod_base = OTHER; note = 2'-O-methylcytidine-3'-phosphorothioate
  modified_base 3: mod_base = OTHER; note = 2'-O-methyluridine-3'-phosphate
  modified_base 4: mod_base = OTHER; note = 2'-O-methylcytidine-3'-phosphate
  modified_base 5: mod_base = OTHER; note = 2'-O-methylcytidine-3'-phosphate
  modified_base 6: mod_base = OTHER; note = 2'-O-methyladenosine-3'-phosphate
  modified_base 7: mod_base = OTHER; note = 2'-deoxy-2'-fluoroguanosine-3'-phosphate
  modified_base 8: mod_base = OTHER; note = 2'-O-methylguanosine-3'-phosphate
  modified_base 9: mod_base = OTHER; note = 2'-deoxy-2'-fluorouridine-3'-phosphate
  modified_base 10: mod_base = OTHER; note = 2'-deoxy-2'-fluorocytidine-3'-phosphate
  modified_base 11: mod_base = OTHER; note = 2'-deoxy-2'-fluorocytidine-3'-phosphate
  modified_base 12: mod_base = OTHER; note = 2'-O-methylcytidine-3'-phosphate
  modified_base 13: mod_base = OTHER; note = 2'-O-methyladenosine-3'-phosphate
  modified_base 14: mod_base = OTHER; note = 2'-O-methyladenosine-3'-phosphate
  modified_base 15: mod_base = OTHER; note = 2'-O-methyladenosine-3'-phosphate
  modified_base 16: mod_base = OTHER; note = 2'-O-methyluridine-3'-phosphate
  modified_base 17: mod_base = OTHER; note = 2'-O-methylguanosine-3'-phosphate
  modified_base 18: mod_base = OTHER; note = 2'-O-methylcytidine-3'-phosphate
  modified_base 19: mod_base = OTHER; note = 2'-O-methylcytidine-3'-phosphate
  modified_base 20: mod_base = OTHER; note = 2'-O-methyladenosine-3'-phosphate
  modified_base 21: mod_base = OTHER; note = 2'-O-methyluridine-3'-phosphate ((2S,4R)-1-[29-[[2-(acetylamino)-2-deoxy-beta-D-galactopyra nosyl]oxy]-14,14-bis[[3-[[3-[[5-[[2-(acetylamino)-2-deoxy-b eta-D-galactopyranosyl]oxy]-1-oxopentyl]amino]propyl]amino] -3-oxopropoxy]methyl]-1,12,19,25-tetraoxo-16-oxa-13,20,24-t riazanonacos-1-yl]-4-hydroxy-2-pyrrolidinyl)methyl ester
cctccaggtcccaaatgccat

SEQ ID NO: 750 - RNA, 21 nt, synthetic construct
  source 1..21: mol_type = other RNA
  modified_base 1: mod_base = OTHER; note = 2'-O-methylcytidine-3'-phosphorothioate
  modified_base 2: mod_base = OTHER; note = 2'-O-methyluridine-3'-phosphorothioate
  modified_base 3: mod_base = OTHER; note = 2'-O-methylcytidine-3'-phosphate
  modified_base 4: mod_base = OTHER; note = 2'-O-methylcytidine-3'-phosphate
  modified_base 5: mod_base = OTHER; note = 2'-O-methyladenosine-3'-phosphate
  modified_base 6: mod_base = OTHER; note = 2'-O-methylguanosine-3'-phosphate
  modified_base 7: mod_base = OTHER; note = 2'-deoxy-2'-fluoroguanosine-3'-phosphate
  modified_base 8: mod_base = OTHER; note = 2'-O-methyluridine-3'-phosphate
  modified_base 9: mod_base = OTHER; note = 2'-deoxy-2'-fluorocytidine-3'-phosphate
  modified_base 10: mod_base = OTHER; note = 2'-deoxy-2'-fluorocytidine-3'-phosphate
  modified_base 11: mod_base = OTHER; note = 2'-deoxy-2'-fluorocytidine-3'-phosphate
  modified_base 12: mod_base = OTHER; note = 2'-O-methyladenosine-3'-phosphate
  modified_base 13: mod_base = OTHER; note = 2'-O-methyladenosine-3'-phosphate
  modified_base 14: mod_base = OTHER; note = 2'-O-methyladenosine-3'-phosphate
  modified_base 15: mod_base = OTHER; note = 2'-O-methyluridine-3'-phosphate
  modified_base 16: mod_base = OTHER; note = 2'-O-methylguanosine-3'-phosphate
  modified_base 17: mod_base = OTHER; note = 2'-O-methylcytidine-3'-phosphate
  modified_base 18: mod_base = OTHER; note = 2'-O-methylcytidine-3'-phosphate
  modified_base 19: mod_base = OTHER; note = 2'-O-methyladenosine-3'-phosphate
  modified_base 20: mod_base = OTHER; note = 2'-O-methylguanosine-3'-phosphate
  modified_base 21: mod_base = OTHER; note = 2'-O-methyluridine-3'-phosphate ((2S,4R)-1-[29-[[2-(acetylamino)-2-deoxy-beta-D-galactopyra nosyl]oxy]-14,14-bis[[3-[[3-[[5-[[2-(acetylamino)-2-deoxy-b eta-D-galactopyranosyl]oxy]-1-oxopentyl]amino]propyl]amino] -3-oxopropoxy]methyl]-1,12,19,25-tetraoxo-16-oxa-13,20,24-t riazanonacos-1-yl]-4-hydroxy-2-pyrrolidinyl)methyl ester
ctccaggtcccaaatgccagt

SEQ ID NO: 751 - RNA, 21 nt, synthetic construct
  source 1..21: mol_type = other RNA
  modified_base 1: mod_base = OTHER; note = 2'-O-methyladenosine-3'-phosphorothioate
  modified_base 2: mod_base = OTHER; note = 2'-O-methylguanosine-3'-phosphorothioate
  modified_base 3: mod_base = OTHER; note = 2'-O-methylguanosine-3'-phosphate
  modified_base 4: mod_base = OTHER; note = 2'-O-methyluridine-3'-phosphate
  modified_base 5: mod_base = OTHER; note = 2'-O-methylcytidine-3'-phosphate
  modified_base 6: mod_base = OTHER; note = 2'-O-methylcytidine-3'-phosphate
  modified_base 7: mod_base = OTHER; note = 2'-deoxy-2'-fluorocytidine-3'-phosphate
  modified_base 8: mod_base = OTHER; note = 2'-O-methyladenosine-3'-phosphate
  modified_base 9: mod_base = OTHER; note = 2'-deoxy-2'-fluoroadenosine-3'-phosphate
  modified_base 10: mod_base = OTHER; note = 2'-deoxy-2'-fluoroadenosine-3'-phosphate
  modified_base 11: mod_base = OTHER; note = 2'-deoxy-2'-fluorouridine-3'-phosphate
  modified_base 12: mod_base = OTHER; note = 2'-O-methylguanosine-3'-phosphate
  modified_base 13: mod_base = OTHER; note = 2'-O-methylcytidine-3'-phosphate
  modified_base 14: mod_base = OTHER; note = 2'-O-methylcytidine-3'-phosphate
  modified_base 15: mod_base = OTHER; note = 2'-O-methyladenosine-3'-phosphate
  modified_base 16: mod_base = OTHER; note = 2'-O-methylguanosine-3'-phosphate
  modified_base 17: mod_base = OTHER; note = 2'-O-methyluridine-3'-phosphate
  modified_base 18: mod_base = OTHER; note = 2'-O-methylguanosine-3'-phosphate
  modified_base 19: mod_base = OTHER; note = 2'-O-methyladenosine-3'-phosphate
  modified_base 20: mod_base = OTHER; note = 2'-O-methylguanosine-3'-phosphate
  modified_base 21: mod_base = OTHER; note = 2'-O-methyluridine-3'-phosphate ((2S,4R)-1-[29-[[2-(acetylamino)-2-deoxy-beta-D-galactopyra nosyl]oxy]-14,14-bis[[3-[[3-[[5-[[2-(acetylamino)-2-deoxy-b eta-D-galactopyranosyl]oxy]-1-oxopentyl]amino]propyl]amino] -3-oxopropoxy]methyl]-1,12,19,25-tetraoxo-16-oxa-13,20,24-t riazanonacos-1-yl]-4-hydroxy-2-pyrrolidinyl)methyl ester
aggtcccaaatgccagtgagt

SEQ ID NO: 752 - RNA, 21 nt, synthetic construct
  source 1..21: mol_type = other RNA
  modified_base 1: mod_base = OTHER; note = 2'-O-methylguanosine-3'-phosphorothioate
  modified_base 2: mod_base = OTHER; note = 2'-O-methyluridine-3'-phosphorothioate
  modified_base 3: mod_base = OTHER; note = 2'-O-methylcytidine-3'-phosphate
  modified_base 4: mod_base = OTHER; note = 2'-O-methylcytidine-3'-phosphate
  modified_base 5: mod_base = OTHER; note = 2'-O-methylcytidine-3'-phosphate
  modified_base 6: mod_base = OTHER; note = 2'-O-methyladenosine-3'-phosphate
  modified_base 7: mod_base = OTHER; note = 2'-deoxy-2'-fluoroadenosine-3'-phosphate
  modified_base 8: mod_base = OTHER; note = 2'-O-methyladenosine-3'-phosphate
  modified_base 9: mod_base = OTHER; note = 2'-deoxy-2'-fluorouridine-3'-phosphate
  modified_base 10: mod_base = OTHER; note = 2'-deoxy-2'-fluoroguanosine-3'-phosphate
  modified_base 11: mod_base = OTHER; note = 2'-deoxy-2'-fluorocytidine-3'-phosphate
  modified_base 12: mod_base = OTHER; note = 2'-O-methylcytidine-3'-phosphate
  modified_base 13: mod_base = OTHER; note = 2'-O-methyladenosine-3'-phosphate
  modified_base 14: mod_base = OTHER; note = 2'-O-methylguanosine-3'-phosphate
  modified_base 15: mod_base = OTHER; note = 2'-O-methyluridine-3'-phosphate
  modified_base 16: mod_base = OTHER; note = 2'-O-methylguanosine-3'-phosphate
  modified_base 17: mod_base = OTHER; note = 2'-O-methyladenosine-3'-phosphate
  modified_base 18: mod_base = OTHER; note = 2'-O-methylguanosine-3'-phosphate
  modified_base 19: mod_base = OTHER; note = 2'-O-methylcytidine-3'-phosphate
  modified_base 20: mod_base = OTHER; note = 2'-O-methyladenosine-3'-phosphate
  modified_base 21: mod_base = OTHER; note = 2'-O-methyluridine-3'-phosphate ((2S,4R)-1-[29-[[2-(acetylamino)-2-deoxy-beta-D-galactopyra nosyl]oxy]-14,14-bis[[3-[[3-[[5-[[2-(acetylamino)-2-deoxy-b eta-D-galactopyranosyl]oxy]-1-oxopentyl]amino]propyl]amino] -3-oxopropoxy]methyl]-1,12,19,25-tetraoxo-16-oxa-13,20,24-t riazanonacos-1-yl]-4-hydroxy-2-pyrrolidinyl)methyl ester
gtcccaaatgccagtgagcat

SEQ ID NO: 753 - RNA, 21 nt, synthetic construct
  source 1..21: mol_type = other RNA
  modified_base 1: mod_base = OTHER; note = 2'-O-methylcytidine-3'-phosphorothioate
  modified_base 2: mod_base = OTHER; note = 2'-O-methylcytidine-3'-phosphorothioate
  modified_base 3: mod_base = OTHER; note = 2'-O-methyluridine-3'-phosphate
  modified_base 4: mod_base = OTHER; note = 2'-O-methylcytidine-3'-phosphate
  modified_base 5: mod_base = OTHER; note = 2'-O-methyladenosine-3'-phosphate
  modified_base 6: mod_base = OTHER; note = 2'-O-methylguanosine-3'-phosphate
  modified_base 7: mod_base = OTHER; note = 2'-deoxy-2'-fluoroguanosine-3'-phosphate
  modified_base 8: mod_base = OTHER; note = 2'-O-methyluridine-3'-phosphate
  modified_base 9: mod_base = OTHER; note = 2'-deoxy-2'-fluorocytidine-3'-phosphate
  modified_base 10: mod_base = OTHER; note = 2'-deoxy-2'-fluorocytidine-3'-phosphate
  modified_base 11: mod_base = OTHER; note = 2'-deoxy-2'-fluoroadenosine-3'-phosphate
  modified_base 12: mod_base = OTHER; note = 2'-O-methylguanosine-3'-phosphate
  modified_base 13: mod_base = OTHER; note = 2'-O-methylcytidine-3'-phosphate
  modified_base 14: mod_base = OTHER; note = 2'-O-methylcytidine-3'-phosphate
  modified_base 15: mod_base = OTHER; note = 2'-O-methyluridine-3'-phosphate
  modified_base 16: mod_base = OTHER; note = 2'-O-methylguanosine-3'-phosphate
  modified_base 17: mod_base = OTHER; note = 2'-O-methyladenosine-3'-phosphate
  modified_base 18: mod_base = OTHER; note = 2'-O-methyladenosine-3'-phosphate
  modified_base 19: mod_base = OTHER; note = 2'-O-methylcytidine-3'-phosphate
  modified_base 20: mod_base = OTHER; note = 2'-O-methyluridine-3'-phosphate
  modified_base 21: mod_base = OTHER; note = 2'-O-methyluridine-3'-phosphate ((2S,4R)-1-[29-[[2-(acetylamino)-2-deoxy-beta-D-galactopyra nosyl]oxy]-14,14-bis[[3-[[3-[[5-[[2-(acetylamino)-2-deoxy-b eta-D-galactopyranosyl]oxy]-1-oxopentyl]amino]propyl]amino] -3-oxopropoxy]methyl]-1,12,19,25-tetraoxo-16-oxa-13,20,24-t riazanonacos-1-yl]-4-hydroxy-2-pyrrolidinyl)methyl ester
cctcaggtccagcctgaactt

SEQ ID NO: 754 - RNA, 21 nt, synthetic construct
  source 1..21: mol_type = other RNA
  modified_base 1: mod_base = OTHER; note = 2'-O-methyluridine-3'-phosphorothioate
  modified_base 2: mod_base = OTHER; note = 2'-O-methylcytidine-3'-phosphorothioate
  modified_base 3: mod_base = OTHER; note = 2'-O-methyladenosine-3'-phosphate
  modified_base 4: mod_base = OTHER; note = 2'-O-methylguanosine-3'-phosphate
  modified_base 5: mod_base = OTHER; note = 2'-O-methylguanosine-3'-phosphate
  modified_base 6: mod_base = OTHER; note = 2'-O-methyluridine-3'-phosphate
  modified_base 7: mod_base = OTHER; note = 2'-deoxy-2'-fluorocytidine-3'-phosphate
  modified_base 8: mod_base = OTHER; note = 2'-O-methylcytidine-3'-phosphate
  modified_base 9: mod_base = OTHER; note = 2'-deoxy-2'-fluoroadenosine-3'-phosphate
  modified_base 10: mod_base = OTHER; note = 2'-deoxy-2'-fluoroguanosine-3'-phosphate
  modified_base 11: mod_base = OTHER; note = 2'-deoxy-2'-fluorocytidine-3'-phosphate
  modified_base 12: mod_base = OTHER; note = 2'-O-methylcytidine-3'-phosphate
  modified_base 13: mod_base = OTHER; note = 2'-O-methyluridine-3'-phosphate
  modified_base 14: mod_base = OTHER; note = 2'-O-methylguanosine-3'-phosphate
  modified_base 15: mod_base = OTHER; note = 2'-O-methyladenosine-3'-phosphate
  modified_base 16: mod_base = OTHER; note = 2'-O-methyladenosine-3'-phosphate
  modified_base 17: mod_base = OTHER; note = 2'-O-methylcytidine-3'-phosphate
  modified_base 18: mod_base = OTHER; note = 2'-O-methyluridine-3'-phosphate
  modified_base 19: mod_base = OTHER; note = 2'-O-methyluridine-3'-phosphate
  modified_base 20: mod_base = OTHER; note = 2'-O-methylcytidine-3'-phosphate
  modified_base 21: mod_base = OTHER; note = 2'-O-methyluridine-3'-phosphate ((2S,4R)-1-[29-[[2-(acetylamino)-2-deoxy-beta-D-galactopyra nosyl]oxy]-14,14-bis[[3-[[3-[[5-[[2-(acetylamino)-2-deoxy-b eta-D-galactopyranosyl]oxy]-1-oxopentyl]amino]propyl]amino] -3-oxopropoxy]methyl]-1,12,19,25-tetraoxo-16-oxa-13,20,24-t riazanonacos-1-yl]-4-hydroxy-2-pyrrolidinyl)methyl ester
tcaggtccagcctgaacttct

SEQ ID NO: 755 - RNA, 21 nt, synthetic construct
  source 1..21: mol_type = other RNA
  modified_base 1: mod_base = OTHER; note = 2'-O-methylcytidine-3'-phosphorothioate
  modified_base 2: mod_base = OTHER; note = 2'-O-methyladenosine-3'-phosphorothioate
  modified_base 3: mod_base = OTHER; note = 2'-O-methylguanosine-3'-phosphate
  modified_base 4: mod_base = OTHER; note = 2'-O-methylguanosine-3'-phosphate
  modified_base 5: mod_base = OTHER; note = 2'-O-methyluridine-3'-phosphate
  modified_base 6: mod_base = OTHER; note = 2'-O-methylcytidine-3'-phosphate
  modified_base 7: mod_base = OTHER; note = 2'-deoxy-2'-fluorocytidine-3'-phosphate
  modified_base 8: mod_base = OTHER; note = 2'-O-methyladenosine-3'-phosphate
  modified_base 9: mod_base = OTHER; note = 2'-deoxy-2'-fluoroguanosine-3'-phosphate
  modified_base 10: mod_base = OTHER; note = 2'-deoxy-2'-fluorocytidine-3'-phosphate
  modified_base 11: mod_base = OTHER; note = 2'-deoxy-2'-fluorocytidine-3'-phosphate
  modified_base 12: mod_base = OTHER; note = 2'-O-methyluridine-3'-phosphate
  modified_base 13: mod_base = OTHER; note = 2'-O-methylguanosine-3'-phosphate
  modified_base 14: mod_base = OTHER; note = 2'-O-methyladenosine-3'-phosphate
  modified_base 15: mod_base = OTHER; note = 2'-O-methyladenosine-3'-phosphate
  modified_base 16: mod_base = OTHER; note = 2'-O-methylcytidine-3'-phosphate
  modified_base 17: mod_base = OTHER; note = 2'-O-methyluridine-3'-phosphate
  modified_base 18: mod_base = OTHER; note = 2'-O-methyluridine-3'-phosphate
  modified_base 19: mod_base = OTHER; note = 2'-O-methylcytidine-3'-phosphate
  modified_base 20: mod_base = OTHER; note = 2'-O-methyluridine-3'-phosphate
  modified_base 21: mod_base = OTHER; note = 2'-O-methyluridine-3'-phosphate ((2S,4R)-1-[29-[[2-(acetylamino)-2-deoxy-beta-D-galactopyra nosyl]oxy]-14,14-bis[[3-[[3-[[5-[[2-(acetylamino)-2-deoxy-b eta-D-galactopyranosyl]oxy]-1-oxopentyl]amino]propyl]amino] -3-oxopropoxy]methyl]-1,12,19,25-tetraoxo-16-oxa-13,20,24-t riazanonacos-1-yl]-4-hydroxy-2-pyrrolidinyl)methyl ester
caggtccagcctgaacttctt

SEQ ID NO: 756 - RNA, 21 nt, synthetic construct
  source 1..21: mol_type = other RNA
  modified_base 1: mod_base = OTHER; note = 2'-O-methyladenosine-3'-phosphorothioate
  modified_base 2: mod_base = OTHER; note = 2'-O-methylguanosine-3'-phosphorothioate
  modified_base 3: mod_base = OTHER; note = 2'-O-methylguanosine-3'-phosphate
  modified_base 4: mod_base = OTHER; note = 2'-O-methyluridine-3'-phosphate
  modified_base 5: mod_base = OTHER; note = 2'-O-methylcytidine-3'-phosphate
  modified_base 6: mod_base = OTHER; note = 2'-O-methylcytidine-3'-phosphate
  modified_base 7: mod_base = OTHER; note = 2'-deoxy-2'-fluoroadenosine-3'-phosphate
  modified_base 8: mod_base = OTHER; note = 2'-O-methylguanosine-3'-phosphate
  modified_base 9: mod_base = OTHER; note = 2'-deoxy-2'-fluorocytidine-3'-phosphate
  modified_base 10: mod_base = OTHER; note = 2'-deoxy-2'-fluorocytidine-3'-phosphate
  modified_base 11: mod_base = OTHER; note = 2'-deoxy-2'-fluorouridine-3'-phosphate
  modified_base 12: mod_base = OTHER; note = 2'-O-methylguanosine-3'-phosphate
  modified_base 13: mod_base = OTHER; note = 2'-O-methyladenosine-3'-phosphate
  modified_base 14: mod_base = OTHER; note = 2'-O-methyladenosine-3'-phosphate
  modified_base 15: mod_base = OTHER; note = 2'-O-methylcytidine-3'-phosphate
  modified_base 16: mod_base = OTHER; note = 2'-O-methyluridine-3'-phosphate
  modified_base 17: mod_base = OTHER; note = 2'-O-methyluridine-3'-phosphate
  modified_base 18: mod_base = OTHER; note = 2'-O-methylcytidine-3'-phosphate
  modified_base 19: mod_base = OTHER; note = 2'-O-methyluridine-3'-phosphate
  modified_base 20: mod_base = OTHER; note = 2'-O-methyluridine-3'-phosphate
  modified_base 21: mod_base = OTHER; note = 2'-O-methyluridine-3'-phosphate ((2S,4R)-1-[29-[[2-(acetylamino)-2-deoxy-beta-D-galactopyra nosyl]oxy]-14,14-bis[[3-[[3-[[5-[[2-(acetylamino)-2-deoxy-b eta-D-galactopyranosyl]oxy]-1-oxopentyl]amino]propyl]amino] -3-oxopropoxy]methyl]-1,12,19,25-tetraoxo-16-oxa-13,20,24-t riazanonacos-1-yl]-4-hydroxy-2-pyrrolidinyl)methyl ester
aggtccagcctgaacttcttt

SEQ ID NO: 757 - RNA, 21 nt, synthetic construct
  source 1..21: mol_type = other RNA
  modified_base 1: mod_base = OTHER; note = 2'-O-methylguanosine-3'-phosphorothioate
  modified_base 2: mod_base = OTHER; note = 2'-O-methylguanosine-3'-phosphorothioate
  modified_base 3: mod_base = OTHER; note = 2'-O-methyluridine-3'-phosphate
  modified_base 4: mod_base = OTHER; note = 2'-O-methylcytidine-3'-phosphate
  modified_base 5: mod_base = OTHER; note = 2'-O-methylcytidine-3'-phosphate
  modified_base 6: mod_base = OTHER; note = 2'-O-methyladenosine-3'-phosphate
  modified_base 7: mod_base = OTHER; note = 2'-deoxy-2'-fluoroguanosine-3'-phosphate
  modified_base 8: mod_base = OTHER; note = 2'-O-methylcytidine-3'-phosphate
  modified_base 9: mod_base = OTHER; note = 2'-deoxy-2'-fluorocytidine-3'-phosphate
  modified_base 10: mod_base = OTHER; note = 2'-deoxy-2'-fluorouridine-3'-phosphate
  modified_base 11: mod_base = OTHER; note = 2'-deoxy-2'-fluoroguanosine-3'-phosphate
  modified_base 12: mod_base = OTHER; note = 2'-O-methyladenosine-3'-phosphate
  modified_base 13: mod_base = OTHER; note = 2'-O-methyladenosine-3'-phosphate
  modified_base 14: mod_base = OTHER; note = 2'-O-methylcytidine-3'-phosphate
  modified_base 15: mod_base = OTHER; note = 2'-O-methyluridine-3'-phosphate
  modified_base 16: mod_base = OTHER; note = 2'-O-methyluridine-3'-phosphate
  modified_base 17: mod_base = OTHER; note = 2'-O-methylcytidine-3'-phosphate
  modified_base 18: mod_base = OTHER; note = 2'-O-methyluridine-3'-phosphate
  modified_base 19: mod_base = OTHER; note = 2'-O-methyluridine-3'-phosphate
  modified_base 20: mod_base = OTHER; note = 2'-O-methylcytidine-3'-phosphate
  modified_base 21: mod_base = OTHER; note = 2'-O-methyluridine-3'-phosphate ((2S,4R)-1-[29-[[2-(acetylamino)-2-deoxy-beta-D-galactopyra nosyl]oxy]-14,14-bis[[3-[[3-[[5-[[2-(acetylamino)-2-deoxy-b eta-D-galactopyranosyl]oxy]-1-oxopentyl]amino]propyl]amino] -3-oxopropoxy]methyl]-1,12,19,25-tetraoxo-16-oxa-13,20,24-t riazanonacos-1-yl]-4-hydroxy-2-pyrrolidinyl)methyl ester
ggtccagcctgaacttcttct

SEQ ID NO: 758 - RNA, 21 nt, synthetic construct
  source 1..21: mol_type = other RNA
  modified_base 1: mod_base = OTHER; note = 2'-O-methyluridine-3'-phosphorothioate
  modified_base 2: mod_base = OTHER; note = 2'-O-methyluridine-3'-phosphorothioate
  modified_base 3: mod_base = OTHER; note = 2'-O-methylguanosine-3'-phosphate
  modified_base 4: mod_base = OTHER; note = 2'-O-methylguanosine-3'-phosphate
  modified_base 5: mod_base = OTHER; note = 2'-O-methylguanosine-3'-phosphate
  modified_base 6: mod_base = OTHER; note = 2'-O-methylcytidine-3'-phosphate
  modified_base 7: mod_base = OTHER; note = 2'-deoxy-2'-fluoroadenosine-3'-phosphate
  modified_base 8: mod_base = OTHER; note = 2'-O-methyladenosine-3'-phosphate
  modified_base 9: mod_base = OTHER; note = 2'-deoxy-2'-fluorouridine-3'-phosphate
  modified_base 10: mod_base = OTHER; note = 2'-deoxy-2'-fluoroadenosine-3'-phosphate
  modified_base 11: mod_base = OTHER; note = 2'-deoxy-2'-fluoroadenosine-3'-phosphate
  modified_base 12: mod_base = OTHER; note = 2'-O-methyladenosine-3'-phosphate
  modified_base 13: mod_base = OTHER; note = 2'-O-methylguanosine-3'-phosphate
  modified_base 14: mod_base = OTHER; note = 2'-O-methyluridine-3'-phosphate
  modified_base 15: mod_base = OTHER; note = 2'-O-methyladenosine-3'-phosphate
  modified_base 16: mod_base = OTHER; note = 2'-O-methylcytidine-3'-phosphate
  modified_base 17: mod_base = OTHER; note = 2'-O-methylcytidine-3'-phosphate
  modified_base 18: mod_base = OTHER; note = 2'-O-methyluridine-3'-phosphate
  modified_base 19: mod_base = OTHER; note = 2'-O-methylguanosine-3'-phosphate
  modified_base 20: mod_base = OTHER; note = 2'-O-methylcytidine-3'-phosphate
  modified_base 21: mod_base = OTHER; note = 2'-O-methyluridine-3'-phosphate ((2S,4R)-1-[29-[[2-(acetylamino)-2-deoxy-beta-D-galactopyra nosyl]oxy]-14,14-bis[[3-[[3-[[5-[[2-(acetylamino)-2-deoxy-b eta-D-galactopyranosyl]oxy]-1-oxopentyl]amino]propyl]amino] -3-oxopropoxy]methyl]-1,12,19,25-tetraoxo-16-oxa-13,20,24-t riazanonacos-1-yl]-4-hydroxy-2-pyrrolidinyl)methyl ester
ttgggcaataaagtacctgct

SEQ ID NO: 759 - RNA, 21 nt, synthetic construct
  source 1..21: mol_type = other RNA
  modified_base 1: mod_base = OTHER; note = 2'-O-methylguanosine-3'-phosphorothioate
  modified_base 2: mod_base = OTHER; note = 2'-O-methylguanosine-3'-phosphorothioate
  modified_base 3: mod_base = OTHER; note = 2'-O-methylcytidine-3'-phosphate
  modified_base 4: mod_base = OTHER; note = 2'-O-methyladenosine-3'-phosphate
  modified_base 5: mod_base = OTHER; note = 2'-O-methyladenosine-3'-phosphate
  modified_base 6: mod_base = OTHER; note = 2'-O-methyluridine-3'-phosphate
  modified_base 7: mod_base = OTHER; note = 2'-deoxy-2'-fluoroadenosine-3'-phosphate
  modified_base 8: mod_base = OTHER; note = 2'-O-methyladenosine-3'-phosphate
  modified_base 9: mod_base = OTHER; note = 2'-deoxy-2'-fluoroadenosine-3'-phosphate
  modified_base 10: mod_base = OTHER; note = 2'-deoxy-2'-fluoroguanosine-3'-phosphate
  modified_base 11: mod_base = OTHER; note = 2'-deoxy-2'-fluorouridine-3'-phosphate
  modified_base 12: mod_base = OTHER; note = 2'-O-methyladenosine-3'-phosphate
  modified_base 13: mod_base = OTHER; note = 2'-O-methylcytidine-3'-phosphate
  modified_base 14: mod_base = OTHER; note = 2'-O-methylcytidine-3'-phosphate
  modified_base 15: mod_base = OTHER; note = 2'-O-methyluridine-3'-phosphate
  modified_base 16: mod_base = OTHER; note = 2'-O-methylguanosine-3'-phosphate
  modified_base 17: mod_base = OTHER; note = 2'-O-methylcytidine-3'-phosphate
  modified_base 18: mod_base = OTHER; note = 2'-O-methyluridine-3'-phosphate
  modified_base 19: mod_base = OTHER; note = 2'-O-methylguanosine-3'-phosphate
  modified_base 20: mod_base = OTHER; note = 2'-O-methylguanosine-3'-phosphate
  modified_base 21: mod_base = OTHER; note = 2'-O-methyluridine-3'-phosphate ((2S,4R)-1-[29-[[2-(acetylamino)-2-deoxy-beta-D-galactopyra nosyl]oxy]-14,14-bis[[3-[[3-[[5-[[2-(acetylamino)-2-deoxy-b eta-D-galactopyranosyl]oxy]-1-oxopentyl]amino]propyl]amino] -3-oxopropoxy]methyl]-1,12,19,25-tetraoxo-16-oxa-13,20,24-t riazanonacos-1-yl]-4-hydroxy-2-pyrrolidinyl)methyl ester
ggcaataaagtacctgctggt

SEQ ID NO: 760 - RNA, 21 nt, synthetic construct
  source 1..21: mol_type = other RNA
  modified_base 1: mod_base = OTHER; note = 2'-O-methyladenosine-3'-phosphorothioate
  modified_base 2: mod_base = OTHER; note = 2'-O-methyladenosine-3'-phosphorothioate
  modified_base 3: mod_base = OTHER; note = 2'-O-methyluridine-3'-phosphate
  modified_base 4: mod_base = OTHER; note = 2'-O-methyladenosine-3'-phosphate
  modified_base 5: mod_base = OTHER; note = 2'-O-methyladenosine-3'-phosphate
  modified_base 6: mod_base = OTHER; note = 2'-O-methyladenosine-3'-phosphate
  modified_base 7: mod_base = OTHER; note = 2'-deoxy-2'-fluoroguanosine-3'-phosphate
  modified_base 8: mod_base = OTHER; note = 2'-O-methyluridine-3'-phosphate
  modified_base 9: mod_base = OTHER; note = 2'-deoxy-2'-fluoroadenosine-3'-phosphate
  modified_base 10: mod_base = OTHER; note = 2'-deoxy-2'-fluorocytidine-3'-phosphate
  modified_base 11: mod_base = OTHER; note = 2'-deoxy-2'-fluorocytidine-3'-phosphate
  modified_base 12: mod_base = OTHER; note = 2'-O-methyluridine-3'-phosphate
  modified_base 13: mod_base = OTHER; note = 2'-O-methylguanosine-3'-phosphate
  modified_base 14: mod_base = OTHER; note = 2'-O-methylcytidine-3'-phosphate
  modified_base 15: mod_base = OTHER; note = 2'-O-methyluridine-3'-phosphate
  modified_base 16: mod_base = OTHER; note = 2'-O-methylguanosine-3'-phosphate
  modified_base 17: mod_base = OTHER; note = 2'-O-methylguanosine-3'-phosphate
  modified_base 18: mod_base = OTHER; note = 2'-O-methyluridine-3'-phosphate
  modified_base 19: mod_base = OTHER; note = 2'-O-methylguanosine-3'-phosphate
  modified_base 20: mod_base = OTHER; note = 2'-O-methylcytidine-3'-phosphate
  modified_base 21: mod_base = OTHER; note = 2'-O-methyluridine-3'-phosphate ((2S,4R)-1-[29-[[2-(acetylamino)-2-deoxy-beta-D-galactopyra nosyl]oxy]-14,14-bis[[3-[[3-[[5-[[2-(acetylamino)-2-deoxy-b eta-D-galactopyranosyl]oxy]-1-oxopentyl]amino]propyl]amino] -3-oxopropoxy]methyl]-1,12,19,25-tetraoxo-16-oxa-13,20,24-t riazanonacos-1-yl]-4-hydroxy-2-pyrrolidinyl)methyl ester
aataaagtacctgctggtgct

SEQ ID NO: 761 - RNA, 21 nt, synthetic construct
  source 1..21: mol_type = other RNA
  modified_base 1: mod_base = OTHER; note = 2'-O-methyladenosine-3'-phosphorothioate
  modified_base 2: mod_base = OTHER; note = 2'-O-methyladenosine-3'-phosphorothioate
  modified_base 3: mod_base = OTHER; note = 2'-O-methyladenosine-3'-phosphate
  modified_base 4: mod_base = OTHER; note = 2'-O-methylguanosine-3'-phosphate
  modified_base 5: mod_base = OTHER; note = 2'-O-methyluridine-3'-phosphate
  modified_base 6: mod_base = OTHER; note = 2'-O-methyladenosine-3'-phosphate
  modified_base 7: mod_base = OTHER; note = 2'-deoxy-2'-fluorocytidine-3'-phosphate
  modified_base 8: mod_base = OTHER; note = 2'-O-methylcytidine-3'-phosphate
  modified_base 9: mod_base = OTHER; note = 2'-deoxy-2'-fluorouridine-3'-phosphate
  modified_base 10: mod_base = OTHER; note = 2'-deoxy-2'-fluoroguanosine-3'-phosphate
  modified_base 11: mod_base = OTHER; note = 2'-deoxy-2'-fluorocytidine-3'-phosphate
  modified_base 12: mod_base = OTHER; note = 2'-O-methyluridine-3'-phosphate
  modified_base 13: mod_base = OTHER; note = 2'-O-methylguanosine-3'-phosphate
  modified_base 14: mod_base = OTHER; note = 2'-O-methylguanosine-3'-phosphate
  modified_base 15: mod_base = OTHER; note = 2'-O-methyluridine-3'-phosphate
  modified_base 16: mod_base = OTHER; note = 2'-O-methylguanosine-3'-phosphate
  modified_base 17: mod_base = OTHER; note = 2'-O-methylcytidine-3'-phosphate
  modified_base 18: mod_base = OTHER; note = 2'-O-methyluridine-3'-phosphate
  modified_base 19: mod_base = OTHER; note = 2'-O-methylguanosine-3'-phosphate
  modified_base 20: mod_base = OTHER; note = 2'-O-methyladenosine-3'-phosphate
  modified_base 21: mod_base = OTHER; note = 2'-O-methyluridine-3'-phosphate ((2S,4R)-1-[29-[[2-(acetylamino)-2-deoxy-beta-D-galactopyra nosyl]oxy]-14,14-bis[[3-[[3-[[5-[[2-(acetylamino)-2-deoxy-b eta-D-galactopyranosyl]oxy]-1-oxopentyl]amino]propyl]amino] -3-oxopropoxy]methyl]-1,12,19,25-tetraoxo-16-oxa-13,20,24-t riazanonacos-1-yl]-4-hydroxy-2-pyrrolidinyl)methyl ester
aaagtacctgctggtgctgat

SEQ ID NO: 762 - RNA, 21 nt, synthetic construct
  source 1..21: mol_type = other RNA
  modified_base 1: mod_base = OTHER; note = 2'-O-methyladenosine-3'-phosphorothioate
  modified_base 2: mod_base = OTHER; note = 2'-O-methylcytidine-3'-phosphorothioate
  modified_base 3: mod_base = OTHER; note = 2'-O-methyluridine-3'-phosphate
  modified_base 4: mod_base = OTHER; note = 2'-O-methyluridine-3'-phosphate
  modified_base 5: mod_base = OTHER; note = 2'-O-methylguanosine-3'-phosphate
  modified_base 6: mod_base = OTHER; note = 2'-O-methyladenosine-3'-phosphate
  modified_base 7: mod_base = OTHER; note = 2'-deoxy-2'-fluoroguanosine-3'-phosphate
  modified_base 8: mod_base = OTHER; note = 2'-O-methylguanosine-3'-phosphate
  modified_base 9: mod_base = OTHER; note = 2'-deoxy-2'-fluoroadenosine-3'-phosphate
  modified_base 10: mod_base = OTHER; note = 2'-deoxy-2'-fluoroguanosine-3'-phosphate
  modified_base 11: mod_base = OTHER; note = 2'-deoxy-2'-fluoroguanosine-3'-phosphate
  modified_base 12: mod_base = OTHER; note = 2'-O-methylcytidine-3'-phosphate
  modified_base 13: mod_base = OTHER; note = 2'-O-methylguanosine-3'-phosphate
  modified_base 14: mod_base = OTHER; note = 2'-O-methyladenosine-3'-phosphate
  modified_base 15: mod_base = OTHER; note = 2'-O-methylguanosine-3'-phosphate
  modified_base 16: mod_base = OTHER; note = 2'-O-methyluridine-3'-phosphate
  modified_base 17: mod_base = OTHER; note = 2'-O-methylcytidine-3'-phosphate
  modified_base 18: mod_base = OTHER; note = 2'-O-methyluridine-3'-phosphate
  modified_base 19: mod_base = OTHER; note = 2'-O-methyladenosine-3'-phosphate
  modified_base 20: mod_base = OTHER; note = 2'-O-methylguanosine-3'-phosphate
  modified_base 21: mod_base = OTHER; note = 2'-O-methyluridine-3'-phosphate ((2S,4R)-1-[29-[[2-(acetylamino)-2-deoxy-beta-D-galactopyra nosyl]oxy]-14,14-bis[[3-[[3-[[5-[[2-(acetylamino)-2-deoxy-b eta-D-galactopyranosyl]oxy]-1-oxopentyl]amino]propyl]amino] -3-oxopropoxy]methyl]-1,12,19,25-tetraoxo-16-oxa-13,20,24-t riazanonacos-1-yl]-4-hydroxy-2-pyrrolidinyl)methyl ester
acttgaggaggcgagtctagt

SEQ ID NO: 763 - RNA, 21 nt, synthetic construct
  source 1..21: mol_type = other RNA
  modified_base 1: mod_base = OTHER; note = 2'-O-methylguanosine-3'-phosphorothioate
  modified_base 2: mod_base = OTHER; note = 2'-O-methyluridine-3'-phosphorothioate
  modified_base 3: mod_base = OTHER; note = 2'-O-methyluridine-3'-phosphate
  modified_base 4: mod_base = OTHER; note = 2'-O-methyluridine-3'-phosphate
  modified_base 5: mod_base = OTHER; note = 2'-O-methylcytidine-3'-phosphate
  modified_base 6: mod_base = OTHER; note = 2'-O-methylcytidine-3'-phosphate
  modified_base 7: mod_base = OTHER; note = 2'-deoxy-2'-fluorocytidine-3'-phosphate
  modified_base 8: mod_base = OTHER; note = 2'-O-methyladenosine-3'-phosphate
  modified_base 9: mod_base = OTHER; note = 2'-deoxy-2'-fluorouridine-3'-phosphate
  modified_base 10: mod_base = OTHER; note = 2'-deoxy-2'-fluorocytidine-3'-phosphate
  modified_base 11: mod_base = OTHER; note = 2'-deoxy-2'-fluorouridine-3'-phosphate
  modified_base 12: mod_base = OTHER; note = 2'-O-methyluridine-3'-phosphate
  modified_base 13: mod_base = OTHER; note = 2'-O-methyluridine-3'-phosphate
  modified_base 14: mod_base = OTHER; note = 2'-O-methylguanosine-3'-phosphate
  modified_base 15: mod_base = OTHER; note = 2'-O-methyluridine-3'-phosphate
  modified_base 16: mod_base = OTHER; note = 2'-O-methylguanosine-3'-phosphate
  modified_base 17: mod_base = OTHER; note = 2'-O-methylcytidine-3'-phosphate
  modified_base 18: mod_base = OTHER; note = 2'-O-methyladenosine-3'-phosphate
  modified_base 19: mod_base = OTHER; note = 2'-O-methylguanosine-3'-phosphate
  modified_base 20: mod_base = OTHER; note = 2'-O-methylcytidine-3'-phosphate
  modified_base 21: mod_base = OTHER; note = 2'-O-methyluridine-3'-phosphate ((2S,4R)-1-[29-[[2-(acetylamino)-2-deoxy-beta-D-galactopyra nosyl]oxy]-14,14-bis[[3-[[3-[[5-[[2-(acetylamino)-2-deoxy-b eta-D-galactopyranosyl]oxy]-1-oxopentyl]amino]propyl]amino] -3-oxopropoxy]methyl]-1,12,19,25-tetraoxo-16-oxa-13,20,24-t riazanonacos-1-yl]-4-hydroxy-2-pyrrolidinyl)methyl ester
gtttcccatctttgtgcagct

SEQ ID NO: 764 - RNA, 21 nt, synthetic construct
  source 1..21: mol_type = other RNA
  modified_base 1: mod_base = OTHER; note = 2'-O-methyluridine-3'-phosphorothioate
  modified_base 2: mod_base = OTHER; note = 2'-O-methylcytidine-3'-phosphorothioate
  modified_base 3: mod_base = OTHER; note = 2'-O-methylcytidine-3'-phosphate
  modified_base 4: mod_base = OTHER; note = 2'-O-methylcytidine-3'-phosphate
  modified_base 5: mod_base = OTHER; note = 2'-O-methyladenosine-3'-phosphate
  modified_base 6: mod_base = OTHER; note = 2'-O-methyluridine-3'-phosphate
  modified_base 7: mod_base = OTHER; note = 2'-deoxy-2'-fluorocytidine-3'-phosphate
  modified_base 8: mod_base = OTHER; note = 2'-O-methyluridine-3'-phosphate
  modified_base 9: mod_base = OTHER; note = 2'-deoxy-2'-fluorouridine-3'-phosphate
  modified_base 10: mod_base = OTHER; note = 2'-deoxy-2'-fluorouridine-3'-phosphate
  modified_base 11: mod_base = OTHER; note = 2'-deoxy-2'-fluoroguanosine-3'-phosphate
  modified_base 12: mod_base = OTHER; note = 2'-O-methyluridine-3'-phosphate
  modified_base 13: mod_base = OTHER; note = 2'-O-methylguanosine-3'-phosphate
  modified_base 14: mod_base = OTHER; note = 2'-O-methylcytidine-3'-phosphate
  modified_base 15: mod_base = OTHER; note = 2'-O-methyladenosine-3'-phosphate
  modified_base 16: mod_base = OTHER; note = 2'-O-methylguanosine-3'-phosphate
  modified_base 17: mod_base = OTHER; note = 2'-O-methylcytidine-3'-phosphate
  modified_base 18: mod_base = OTHER; note = 2'-O-methyluridine-3'-phosphate
  modified_base 19: mod_base = OTHER; note = 2'-O-methyladenosine-3'-phosphate
  modified_base 20: mod_base = OTHER; note = 2'-O-methylcytidine-3'-phosphate
  modified_base 21: mod_base = OTHER; note = 2'-O-methyluridine-3'-phosphate ((2S,4R)-1-[29-[[2-(acetylamino)-2-deoxy-beta-D-galactopyra nosyl]oxy]-14,14-bis[[3-[[3-[[5-[[2-(acetylamino)-2-deoxy-b eta-D-galactopyranosyl]oxy]-1-oxopentyl]amino]propyl]amino] -3-oxopropoxy]methyl]-1,12,19,25-tetraoxo-16-oxa-13,20,24-t riazanonacos-1-yl]-4-hydroxy-2-pyrrolidinyl)methyl ester
tcccatctttgtgcagctact

SEQ ID NO: 765 - RNA, 21 nt, synthetic construct
  source 1..21: mol_type = other RNA
  modified_base 1: mod_base = OTHER; note = 2'-O-methylcytidine-3'-phosphorothioate
  modified_base 2: mod_base = OTHER; note = 2'-O-methyladenosine-3'-phosphorothioate
  modified_base 3: mod_base = OTHER; note = 2'-O-methyluridine-3'-phosphate
  modified_base 4: mod_base = OTHER; note = 2'-O-methylcytidine-3'-phosphate
  modified_base 5: mod_base = OTHER; note = 2'-O-methyluridine-3'-phosphate
  modified_base 6: mod_base = OTHER; note = 2'-O-methyluridine-3'-phosphate
  modified_base 7: mod_base = OTHER; note = 2'-deoxy-2'-fluorouridine-3'-phosphate
  modified_base 8: mod_base = OTHER; note = 2'-O-methylguanosine-3'-phosphate
  modified_base 9: mod_base = OTHER; note = 2'-deoxy-2'-fluorouridine-3'-phosphate
  modified_base 10: mod_base = OTHER; note = 2'-deoxy-2'-fluoroguanosine-3'-phosphate
  modified_base 11: mod_base = OTHER; note = 2'-deoxy-2'-fluorocytidine-3'-phosphate
  modified_base 12: mod_base = OTHER; note = 2'-O-methyladenosine-3'-phosphate
  modified_base 13: mod_base = OTHER; note = 2'-O-methylguanosine-3'-phosphate
  modified_base 14: mod_base = OTHER; note = 2'-O-methylcytidine-3'-phosphate
  modified_base 15: mod_base = OTHER; note = 2'-O-methyluridine-3'-phosphate
  modified_base 16: mod_base = OTHER; note = 2'-O-methyladenosine-3'-phosphate
  modified_base 17: mod_base = OTHER; note = 2'-O-methylcytidine-3'-phosphate
  modified_base 18: mod_base = OTHER; note = 2'-O-methylcytidine-3'-phosphate
  modified_base 19: mod_base = OTHER; note = 2'-O-methyluridine-3'-phosphate
  modified_base 20: mod_base = OTHER; note = 2'-O-methylcytidine-3'-phosphate
  modified_base 21: mod_base = OTHER; note = 2'-O-methyluridine-3'-phosphate ((2S,4R)-1-[29-[[2-(acetylamino)-2-deoxy-beta-D-galactopyra nosyl]oxy]-14,14-bis[[3-[[3-[[5-[[2-(acetylamino)-2-deoxy-b eta-D-galactopyranosyl]oxy]-1-oxopentyl]amino]propyl]amino] -3-oxopropoxy]methyl]-1,12,19,25-tetraoxo-16-oxa-13,20,24-t riazanonacos-1-yl]-4-hydroxy-2-pyrrolidinyl)methyl ester
catctttgtgcagctacctct

SEQ ID NO: 766 - RNA, 21 nt, synthetic construct
  source 1..21: mol_type = other RNA
  modified_base 1: mod_base = OTHER; note = 2'-O-methyluridine-3'-phosphorothioate
  modified_base 2: mod_base = OTHER; note = 2'-O-methylguanosine-3'-phosphorothioate
  modified_base 3: mod_base = OTHER; note = 2'-O-methyluridine-3'-phosphate
  modified_base 4: mod_base = OTHER; note = 2'-O-methylguanosine-3'-phosphate
  modified_base 5: mod_base = OTHER; note = 2'-O-methylcytidine-3'-phosphate
  modified_base 6: mod_base = OTHER; note = 2'-O-methyladenosine-3'-phosphate
  modified_base 7: mod_base = OTHER; note = 2'-deoxy-2'-fluoroguanosine-3'-phosphate
  modified_base 8: mod_base = OTHER; note = 2'-O-methylcytidine-3'-phosphate
  modified_base 9: mod_base = OTHER; note = 2'-deoxy-2'-fluorouridine-3'-phosphate
  modified_base 10: mod_base = OTHER; note = 2'-deoxy-2'-fluoroadenosine-3'-phosphate
  modified_base 11: mod_base = OTHER; note = 2'-deoxy-2'-fluorocytidine-3'-phosphate
  modified_base 12: mod_base = OTHER; note = 2'-O-methylcytidine-3'-phosphate
  modified_base 13: mod_base = OTHER; note = 2'-O-methyluridine-3'-phosphate
  modified_base 14: mod_base = OTHER; note = 2'-O-methylcytidine-3'-phosphate
  modified_base 15: mod_base = OTHER; note = 2'-O-methylcytidine-3'-phosphate
  modified_base 16: mod_base = OTHER; note = 2'-O-methylguanosine-3'-phosphate
  modified_base 17: mod_base = OTHER; note = 2'-O-methylcytidine-3'-phosphate
  modified_base 18: mod_base = OTHER; note = 2'-O-methyladenosine-3'-phosphate
  modified_base 19: mod_base = OTHER; note = 2'-O-methyluridine-3'-phosphate
  modified_base 20: mod_base = OTHER; note = 2'-O-methyluridine-3'-phosphate
  modified_base 21: mod_base = OTHER; note = 2'-O-methyluridine-3'-phosphate ((2S,4R)-1-[29-[[2-(acetylamino)-2-deoxy-beta-D-galactopyra nosyl]oxy]-14,14-bis[[3-[[3-[[5-[[2-(acetylamino)-2-deoxy-b eta-D-galactopyranosyl]oxy]-1-oxopentyl]amino]propyl]amino] -3-oxopropoxy]methyl]-1,12,19,25-tetraoxo-16-oxa-13,20,24-t riazanonacos-1-yl]-4-hydroxy-2-pyrrolidinyl)methyl ester
tgtgcagctacctccgcattt

SEQ ID NO: 767 - RNA, 21 nt, synthetic construct
  source 1..21: mol_type = other RNA
  modified_base 1: mod_base = OTHER; note = 2'-O-methyluridine-3'-phosphorothioate
  modified_base 2: mod_base = OTHER; note = 2'-O-methylguanosine-3'-phosphorothioate
  modified_base 3: mod_base = OTHER; note = 2'-O-methylcytidine-3'-phosphate
  modified_base 4: mod_base = OTHER; note = 2'-O-methyladenosine-3'-phosphate
  modified_base 5: mod_base = OTHER; note = 2'-O-methylguanosine-3'-phosphate
  modified_base 6: mod_base = OTHER; note = 2'-O-methylcytidine-3'-phosphate
  modified_base 7: mod_base = OTHER; note = 2'-deoxy-2'-fluorouridine-3'-phosphate
  modified_base 8: mod_base = OTHER; note = 2'-O-methyladenosine-3'-phosphate
  modified_base 9: mod_base = OTHER; note = 2'-deoxy-2'-fluorocytidine-3'-phosphate
  modified_base 10: mod_base = OTHER; note = 2'-deoxy-2'-fluorocytidine-3'-phosphate
  modified_base 11: mod_base = OTHER; note = 2'-deoxy-2'-fluorouridine-3'-phosphate
  modified_base 12: mod_base = OTHER; note = 2'-O-methylcytidine-3'-phosphate
  modified_base 13: mod_base = OTHER; note = 2'-O-methylcytidine-3'-phosphate
  modified_base 14: mod_base = OTHER; note = 2'-O-methylguanosine-3'-phosphate
  modified_base 15: mod_base = OTHER; note = 2'-O-methylcytidine-3'-phosphate
  modified_base 16: mod_base = OTHER; note = 2'-O-methyladenosine-3'-phosphate
  modified_base 17: mod_base = OTHER; note = 2'-O-methyluridine-3'-phosphate
  modified_base 18: mod_base = OTHER; note = 2'-O-methyluridine-3'-phosphate
  modified_base 19: mod_base = OTHER; note = 2'-O-methylguanosine-3'-phosphate
  modified_base 20: mod_base = OTHER; note = 2'-O-methylcytidine-3'-phosphate
  modified_base 21: mod_base = OTHER; note = 2'-O-methyluridine-3'-phosphate ((2S,4R)-1-[29-[[2-(acetylamino)-2-deoxy-beta-D-galactopyra nosyl]oxy]-14,14-bis[[3-[[3-[[5-[[2-(acetylamino)-2-deoxy-b eta-D-galactopyranosyl]oxy]-1-oxopentyl]amino]propyl]amino] -3-oxopropoxy]methyl]-1,12,19,25-tetraoxo-16-oxa-13,20,24-t riazanonacos-1-yl]-4-hydroxy-2-pyrrolidinyl)methyl ester
tgcagctacctccgcattgct

SEQ ID NO: 768 - RNA, 21 nt, synthetic construct
  source 1..21: mol_type = other RNA
  modified_base 1: mod_base = OTHER; note = 2'-O-methyluridine-3'-phosphorothioate
  modified_base 2: mod_base = OTHER; note = 2'-O-methylguanosine-3'-phosphorothioate
  modified_base 3: mod_base = OTHER; note = 2'-O-methylcytidine-3'-phosphate
  modified_base 4: mod_base = OTHER; note = 2'-O-methylcytidine-3'-phosphate
  modified_base 5: mod_base = OTHER; note = 2'-O-methyluridine-3'-phosphate
  modified_base 6: mod_base = OTHER; note = 2'-O-methylguanosine-3'-phosphate
  modified_base 7: mod_base = OTHER; note = 2'-deoxy-2'-fluorouridine-3'-phosphate
  modified_base 8: mod_base = OTHER; note = 2'-O-methylguanosine-3'-phosphate
  modified_base 9: mod_base = OTHER; note = 2'-deoxy-2'-fluoroadenosine-3'-phosphate
  modified_base 10: mod_base = OTHER; note = 2'-deoxy-2'-fluorocytidine-3'-phosphate
  modified_base 11: mod_base = OTHER; note = 2'-deoxy-2'-fluoroguanosine-3'-phosphate
  modified_base 12: mod_base = OTHER; note = 2'-O-methyluridine-3'-phosphate
  modified_base 13: mod_base = OTHER; note = 2'-O-methylguanosine-3'-phosphate
  modified_base 14: mod_base = OTHER; note = 2'-O-methylguanosine-3'-phosphate
  modified_base 15: mod_base = OTHER; note = 2'-O-methyladenosine-3'-phosphate
  modified_base 16: mod_base = OTHER; note = 2'-O-methylguanosine-3'-phosphate
  modified_base 17: mod_base = OTHER; note = 2'-O-methylguanosine-3'-phosphate
  modified_base 18: mod_base = OTHER; note = 2'-O-methyladenosine-3'-phosphate
  modified_base 19: mod_base = OTHER; note = 2'-O-methyluridine-3'-phosphate
  modified_base 20: mod_base = OTHER; note = 2'-O-methylcytidine-3'-phosphate
  modified_base 21: mod_base = OTHER; note = 2'-O-methyluridine-3'-phosphate ((2S,4R)-1-[29-[[2-(acetylamino)-2-deoxy-beta-D-galactopyra nosyl]oxy]-14,14-bis[[3-[[3-[[5-[[2-(acetylamino)-2-deoxy-b eta-D-galactopyranosyl]oxy]-1-oxopentyl]amino]propyl]amino] -3-oxopropoxy]methyl]-1,12,19,25-tetraoxo-16-oxa-13,20,24-t riazanonacos-1-yl]-4-hydroxy-2-pyrrolidinyl)methyl ester
tgcctgtgacgtggaggatct

SEQ ID NO: 769 - RNA, 21 nt, synthetic construct
  source 1..21: mol_type = other RNA
  modified_base 1: mod_base = OTHER; note = 2'-O-methylcytidine-3'-phosphorothioate
  modified_base 2: mod_base = OTHER; note = 2'-O-methyladenosine-3'-phosphorothioate
  modified_base 3: mod_base = OTHER; note = 2'-O-methylguanosine-3'-phosphate
  modified_base 4: mod_base = OTHER; note = 2'-O-methylcytidine-3'-phosphate
  modified_base 5: mod_base = OTHER; note = 2'-O-methylcytidine-3'-phosphate
  modified_base 6: mod_base = OTHER; note = 2'-O-methyluridine-3'-phosphate
  modified_base 7: mod_base = OTHER; note = 2'-deoxy-2'-fluorocytidine-3'-phosphate
  modified_base 8: mod_base = OTHER; note = 2'-O-methyluridine-3'-phosphate
  modified_base 9: mod_base = OTHER; note = 2'-deoxy-2'-fluoroguanosine-3'-phosphate
  modified_base 10: mod_base = OTHER; note = 2'-deoxy-2'-fluoroadenosine-3'-phosphate
  modified_base 11: mod_base = OTHER; note = 2'-deoxy-2'-fluoroguanosine-3'-phosphate
  modified_base 12: mod_base = OTHER; note = 2'-O-methylcytidine-3'-phosphate
  modified_base 13: mod_base = OTHER; note = 2'-O-methyluridine-3'-phosphate
  modified_base 14: mod_base = OTHER; note = 2'-O-methylguanosine-3'-phosphate
  modified_base 15: mod_base = OTHER; note = 2'-O-methyladenosine-3'-phosphate
  modified_base 16: mod_base = OTHER; note = 2'-O-methylguanosine-3'-phosphate
  modified_base 17: mod_base = OTHER; note = 2'-O-methyluridine-3'-phosphate
  modified_base 18: mod_base = OTHER; note = 2'-O-methyluridine-3'-phosphate
  modified_base 19: mod_base = OTHER; note = 2'-O-methylguanosine-3'-phosphate
  modified_base 20: mod_base = OTHER; note = 2'-O-methylguanosine-3'-phosphate
  modified_base 21: mod_base = OTHER; note = 2'-O-methyluridine-3'-phosphate ((2S,4R)-1-[29-[[2-(acetylamino)-2-deoxy-beta-D-galactopyra nosyl]oxy]-14,14-bis[[3-[[3-[[5-[[2-(acetylamino)-2-deoxy-b eta-D-galactopyranosyl]oxy]-1-oxopentyl]amino]propyl]amino] -3-oxopropoxy]methyl]-1,12,19,25-tetraoxo-16-oxa-13,20,24-t riazanonacos-1-yl]-4-hydroxy-2-pyrrolidinyl)methyl ester
cagcctctgagctgagttggt

SEQ ID NO: 770 - RNA, 21 nt, synthetic construct
  source 1..21: mol_type = other RNA
  modified_base 1: mod_base = OTHER; note = 2'-O-methyladenosine-3'-phosphorothioate
  modified_base 2: mod_base = OTHER; note = 2'-O-methylguanosine-3'-phosphorothioate
  modified_base 3: mod_base = OTHER; note = 2'-O-methylcytidine-3'-phosphate
  modified_base 4: mod_base = OTHER; note = 2'-O-methylcytidine-3'-phosphate
  modified_base 5: mod_base = OTHER; note = 2'-O-methyluridine-3'-phosphate
  modified_base 6: mod_base = OTHER; note = 2'-O-methylcytidine-3'-phosphate
  modified_base 7: mod_base = OTHER; note = 2'-deoxy-2'-fluorouridine-3'-phosphate
  modified_base 8: mod_base = OTHER; note = 2'-O-methylguanosine-3'-phosphate
  modified_base 9: mod_base = OTHER; note = 2'-deoxy-2'-fluoroadenosine-3'-phosphate
  modified_base 10: mod_base = OTHER; note = 2'-deoxy-2'-fluoroguanosine-3'-phosphate
  modified_base 11: mod_base = OTHER; note = 2'-deoxy-2'-fluorocytidine-3'-phosphate
  modified_base 12: mod_base = OTHER; note = 2'-O-methyluridine-3'-phosphate
  modified_base 13: mod_base = OTHER; note = 2'-O-methylguanosine-3'-phosphate
  modified_base 14: mod_base = OTHER; note = 2'-O-methyladenosine-3'-phosphate
  modified_base 15: mod_base = OTHER; note = 2'-O-methylguanosine-3'-phosphate
  modified_base 16: mod_base = OTHER; note = 2'-O-methyluridine-3'-phosphate
  modified_base 17: mod_base = OTHER; note = 2'-O-methyluridine-3'-phosphate
  modified_base 18: mod_base = OTHER; note = 2'-O-methylguanosine-3'-phosphate
  modified_base 19: mod_base = OTHER; note = 2'-O-methylguanosine-3'-phosphate
  modified_base 20: mod_base = OTHER; note = 2'-O-methyluridine-3'-phosphate
  modified_base 21: mod_base = OTHER; note = 2'-O-methyluridine-3'-phosphate ((2S,4R)-1-[29-[[2-(acetylamino)-2-deoxy-beta-D-galactopyra nosyl]oxy]-14,14-bis[[3-[[3-[[5-[[2-(acetylamino)-2-deoxy-b eta-D-galactopyranosyl]oxy]-1-oxopentyl]amino]propyl]amino] -3-oxopropoxy]methyl]-1,12,19,25-tetraoxo-16-oxa-13,20,24-t riazanonacos-1-yl]-4-hydroxy-2-pyrrolidinyl)methyl ester
agcctctgagctgagttggtt

SEQ ID NO: 771 - RNA, 21 nt, synthetic construct
  source 1..21: mol_type = other RNA
  modified_base 1: mod_base = OTHER; note = 2'-O-methylguanosine-3'-phosphorothioate
  modified_base 2: mod_base = OTHER; note = 2'-O-methylcytidine-3'-phosphorothioate
  modified_base 3: mod_base = OTHER; note = 2'-O-methylcytidine-3'-phosphate
  modified_base 4: mod_base = OTHER; note = 2'-O-methyluridine-3'-phosphate
  modified_base 5: mod_base = OTHER; note = 2'-O-methylcytidine-3'-phosphate
  modified_base 6: mod_base = OTHER; note = 2'-O-methyluridine-3'-phosphate
  modified_base 7: mod_base = OTHER; note = 2'-deoxy-2'-fluoroguanosine-3'-phosphate
  modified_base 8: mod_base = OTHER; note = 2'-O-methyladenosine-3'-phosphate
  modified_base 9: mod_base = OTHER; note = 2'-deoxy-2'-fluoroguanosine-3'-phosphate
  modified_base 10: mod_base = OTHER; note = 2'-deoxy-2'-fluorocytidine-3'-phosphate
  modified_base 11: mod_base = OTHER; note = 2'-deoxy-2'-fluorouridine-3'-phosphate
  modified_base 12: mod_base = OTHER; note = 2'-O-methylguanosine-3'-phosphate
  modified_base 13: mod_base = OTHER; note = 2'-O-methyladenosine-3'-phosphate
  modified_base 14: mod_base = OTHER; note = 2'-O-methylguanosine-3'-phosphate
  modified_base 15: mod_base = OTHER; note = 2'-O-methyluridine-3'-phosphate
  modified_base 16: mod_base = OTHER; note = 2'-O-methyluridine-3'-phosphate
  modified_base 17: mod_base = OTHER; note = 2'-O-methylguanosine-3'-phosphate
  modified_base 18: mod_base = OTHER; note = 2'-O-methylguanosine-3'-phosphate
  modified_base 19: mod_base = OTHER; note = 2'-O-methyluridine-3'-phosphate
  modified_base 20: mod_base = OTHER; note = 2'-O-methyluridine-3'-phosphate
  modified_base 21: mod_base = OTHER; note = 2'-O-methyluridine-3'-phosphate ((2S,4R)-1-[29-[[2-(acetylamino)-2-deoxy-beta-D-galactopyra nosyl]oxy]-14,14-bis[[3-[[3-[[5-[[2-(acetylamino)-2-deoxy-b eta-D-galactopyranosyl]oxy]-1-oxopentyl]amino]propyl]amino] -3-oxopropoxy]methyl]-1,12,19,25-tetraoxo-16-oxa-13,20,24-t riazanonacos-1-yl]-4-hydroxy-2-pyrrolidinyl)methyl ester
gcctctgagctgagttggttt

SEQ ID NO: 772 - RNA, 21 nt, synthetic construct
  source 1..21: mol_type = other RNA
  modified_base 1: mod_base = OTHER; note = 2'-O-methylcytidine-3'-phosphorothioate
  modified_base 2: mod_base = OTHER; note = 2'-O-methylcytidine-3'-phosphorothioate
  modified_base 3: mod_base = OTHER; note = 2'-O-methyluridine-3'-phosphate
  modified_base 4: mod_base = OTHER; note = 2'-O-methylcytidine-3'-phosphate
  modified_base 5: mod_base = OTHER; note = 2'-O-methyluridine-3'-phosphate
  modified_base 6: mod_base = OTHER; note = 2'-O-methylguanosine-3'-phosphate
  modified_base 7: mod_base = OTHER; note = 2'-deoxy-2'-fluoroadenosine-3'-phosphate
  modified_base 8: mod_base = OTHER; note = 2'-O-methylguanosine-3'-phosphate
  modified_base 9: mod_base = OTHER; note = 2'-deoxy-2'-fluorocytidine-3'-phosphate
  modified_base 10: mod_base = OTHER; note = 2'-deoxy-2'-fluorouridine-3'-phosphate
  modified_base 11: mod_base = OTHER; note = 2'-deoxy-2'-fluoroguanosine-3'-phosphate
  modified_base 12: mod_base = OTHER; note = 2'-O-methyladenosine-3'-phosphate
  modified_base 13: mod_base = OTHER; note = 2'-O-methylguanosine-3'-phosphate
  modified_base 14: mod_base = OTHER; note = 2'-O-methyluridine-3'-phosphate
  modified_base 15: mod_base = OTHER; note = 2'-O-methyluridine-3'-phosphate
  modified_base 16: mod_base = OTHER; note = 2'-O-methylguanosine-3'-phosphate
  modified_base 17: mod_base = OTHER; note = 2'-O-methylguanosine-3'-phosphate
  modified_base 18: mod_base = OTHER; note = 2'-O-methyluridine-3'-phosphate
  modified_base 19: mod_base = OTHER; note = 2'-O-methyluridine-3'-phosphate
  modified_base 20: mod_base = OTHER; note = 2'-O-methyluridine-3'-phosphate
  modified_base 21: mod_base = OTHER; note = 2'-O-methyluridine-3'-phosphate ((2S,4R)-1-[29-[[2-(acetylamino)-2-deoxy-beta-D-galactopyra nosyl]oxy]-14,14-bis[[3-[[3-[[5-[[2-(acetylamino)-2-deoxy-b eta-D-galactopyranosyl]oxy]-1-oxopentyl]amino]propyl]amino] -3-oxopropoxy]methyl]-1,12,19,25-tetraoxo-16-oxa-13,20,24-t riazanonacos-1-yl]-4-hydroxy-2-pyrrolidinyl)methyl ester
cctctgagctgagttggtttt

SEQ ID NO: 773 - RNA, 21 nt, synthetic construct
  source 1..21: mol_type = other RNA
  modified_base 1: mod_base = OTHER; note = 2'-O-methylcytidine-3'-phosphorothioate
  modified_base 2: mod_base = OTHER; note = 2'-O-methyluridine-3'-phosphorothioate
  modified_base 3: mod_base = OTHER; note = 2'-O-methylcytidine-3'-phosphate
  modified_base 4: mod_base = OTHER; note = 2'-O-methyluridine-3'-phosphate
  modified_base 5: mod_base = OTHER; note = 2'-O-methylguanosine-3'-phosphate
  modified_base 6: mod_base = OTHER; note = 2'-O-methyladenosine-3'-phosphate
  modified_base 7: mod_base = OTHER; note = 2'-deoxy-2'-fluoroguanosine-3'-phosphate
  modified_base 8: mod_base = OTHER; note = 2'-O-methylcytidine-3'-phosphate
  modified_base 9: mod_base = OTHER; note = 2'-deoxy-2'-fluorouridine-3'-phosphate
  modified_base 10: mod_base = OTHER; note = 2'-deoxy-2'-fluoroguanosine-3'-phosphate
  modified_base 11: mod_base = OTHER; note = 2'-deoxy-2'-fluoroadenosine-3'-phosphate
  modified_base 12: mod_base = OTHER; note = 2'-O-methylguanosine-3'-phosphate
  modified_base 13: mod_base = OTHER; note = 2'-O-methyluridine-3'-phosphate
  modified_base 14: mod_base = OTHER; note = 2'-O-methyluridine-3'-phosphate
  modified_base 15: mod_base = OTHER; note = 2'-O-methylguanosine-3'-phosphate
  modified_base 16: mod_base = OTHER; note = 2'-O-methylguanosine-3'-phosphate
  modified_base 17: mod_base = OTHER; note = 2'-O-methyluridine-3'-phosphate
  modified_base 18: mod_base = OTHER; note = 2'-O-methyluridine-3'-phosphate
  modified_base 19: mod_base = OTHER; note = 2'-O-methyluridine-3'-phosphate
  modified_base 20: mod_base = OTHER; note = 2'-O-methyluridine-3'-phosphate
  modified_base 21: mod_base = OTHER; note = 2'-O-methyluridine-3'-phosphate ((2S,4R)-1-[29-[[2-(acetylamino)-2-deoxy-beta-D-galactopyra nosyl]oxy]-14,14-bis[[3-[[3-[[5-[[2-(acetylamino)-2-deoxy-b eta-D-galactopyranosyl]oxy]-1-oxopentyl]amino]propyl]amino] -3-oxopropoxy]methyl]-1,12,19,25-tetraoxo-16-oxa-13,20,24-t riazanonacos-1-yl]-4-hydroxy-2-pyrrolidinyl)methyl ester
ctctgagctgagttggttttt

SEQ ID NO: 774 - RNA, 21 nt, synthetic construct
  source 1..21: mol_type = other RNA
  modified_base 1: mod_base = OTHER; note = 2'-O-methyluridine-3'-phosphorothioate
  modified_base 2: mod_base = OTHER; note = 2'-O-methylcytidine-3'-phosphorothioate
  modified_base 3: mod_base = OTHER; note = 2'-O-methyluridine-3'-phosphate
  modified_base 4: mod_base = OTHER; note = 2'-O-methylguanosine-3'-phosphate
  modified_base 5: mod_base = OTHER; note = 2'-O-methyladenosine-3'-phosphate
  modified_base 6: mod_base = OTHER; note = 2'-O-methylguanosine-3'-phosphate
  modified_base 7: mod_base = OTHER; note = 2'-deoxy-2'-fluorocytidine-3'-phosphate
  modified_base 8: mod_base = OTHER; note = 2'-O-methyluridine-3'-phosphate
  modified_base 9: mod_base = OTHER; note = 2'-deoxy-2'-fluoroguanosine-3'-phosphate
  modified_base 10: mod_base = OTHER; note = 2'-deoxy-2'-fluoroadenosine-3'-phosphate
  modified_base 11: mod_base = OTHER; note = 2'-deoxy-2'-fluoroguanosine-3'-phosphate
  modified_base 12: mod_base = OTHER; note = 2'-O-methyluridine-3'-phosphate
  modified_base 13: mod_base = OTHER; note = 2'-O-methyluridine-3'-phosphate
  modified_base 14: mod_base = OTHER; note = 2'-O-methylguanosine-3'-phosphate
  modified_base 15: mod_base = OTHER; note = 2'-O-methylguanosine-3'-phosphate
  modified_base 16: mod_base = OTHER; note = 2'-O-methyluridine-3'-phosphate
  modified_base 17: mod_base = OTHER; note = 2'-O-methyluridine-3'-phosphate
  modified_base 18: mod_base = OTHER; note = 2'-O-methyluridine-3'-phosphate
  modified_base 19: mod_base = OTHER; note = 2'-O-methyluridine-3'-phosphate
  modified_base 20: mod_base = OTHER; note = 2'-O-methyladenosine-3'-phosphate
  modified_base 21: mod_base = OTHER; note = 2'-O-methyluridine-3'-phosphate ((2S,4R)-1-[29-[[2-(acetylamino)-2-deoxy-beta-D-galactopyra nosyl]oxy]-14,14-bis[[3-[[3-[[5-[[2-(acetylamino)-2-deoxy-b eta-D-galactopyranosyl]oxy]-1-oxopentyl]amino]propyl]amino] -3-oxopropoxy]methyl]-1,12,19,25-tetraoxo-16-oxa-13,20,24-t riazanonacos-1-yl]-4-hydroxy-2-pyrrolidinyl)methyl ester
tctgagctgagttggttttat

SEQ ID NO: 775 - RNA, 21 nt, synthetic construct
  source 1..21: mol_type = other RNA
  modified_base 1: mod_base = OTHER; note = 2'-O-methylcytidine-3'-phosphorothioate
  modified_base 2: mod_base = OTHER; note = 2'-O-methyluridine-3'-phosphorothioate
  modified_base 3: mod_base = OTHER; note = 2'-O-methylguanosine-3'-phosphate
  modified_base 4: mod_base = OTHER; note = 2'-O-methyladenosine-3'-phosphate
  modified_base 5: mod_base = OTHER; note = 2'-O-methylguanosine-3'-phosphate
  modified_base 6: mod_base = OTHER; note = 2'-O-methylcytidine-3'-phosphate
  modified_base 7: mod_base = OTHER; note = 2'-deoxy-2'-fluorouridine-3'-phosphate
  modified_base 8: mod_base = OTHER; note = 2'-O-methylguanosine-3'-phosphate
  modified_base 9: mod_base = OTHER; note = 2'-deoxy-2'-fluoroadenosine-3'-phosphate
  modified_base 10: mod_base = OTHER; note = 2'-deoxy-2'-fluoroguanosine-3'-phosphate
  modified_base 11: mod_base = OTHER; note = 2'-deoxy-2'-fluorouridine-3'-phosphate
  modified_base 12: mod_base = OTHER; note = 2'-O-methyluridine-3'-phosphate
  modified_base 13: mod_base = OTHER; note = 2'-O-methylguanosine-3'-phosphate
  modified_base 14: mod_base = OTHER; note = 2'-O-methylguanosine-3'-phosphate
  modified_base 15: mod_base = OTHER; note = 2'-O-methyluridine-3'-phosphate
  modified_base 16: mod_base = OTHER; note = 2'-O-methyluridine-3'-phosphate
  modified_base 17: mod_base = OTHER; note = 2'-O-methyluridine-3'-phosphate
  modified_base 18: mod_base = OTHER; note = 2'-O-methyluridine-3'-phosphate
  modified_base 19: mod_base = OTHER; note = 2'-O-methyladenosine-3'-phosphate
  modified_base 20: mod_base = OTHER; note = 2'-O-methyluridine-3'-phosphate
  modified_base 21: mod_base = OTHER; note = 2'-O-methyluridine-3'-phosphate ((2S,4R)-1-[29-[[2-(acetylamino)-2-deoxy-beta-D-galactopyra nosyl]oxy]-14,14-bis[[3-[[3-[[5-[[2-(acetylamino)-2-deoxy-b eta-D-galactopyranosyl]oxy]-1-oxopentyl]amino]propyl]amino] -3-oxopropoxy]methyl]-1,12,19,25-tetraoxo-16-oxa-13,20,24-t riazanonacos-1-yl]-4-hydroxy-2-pyrrolidinyl)methyl ester
ctgagctgagttggttttatt

SEQ ID NO: 776 - RNA, 21 nt, synthetic construct
  source 1..21: mol_type = other RNA
  modified_base 1: mod_base = OTHER; note = 2'-O-methyluridine-3'-phosphorothioate
  modified_base 2: mod_base = OTHER; note = 2'-O-methylguanosine-3'-phosphorothioate
  modified_base 3: mod_base = OTHER; note = 2'-O-methyladenosine-3'-phosphate
  modified_base 4: mod_base = OTHER; note = 2'-O-methylguanosine-3'-phosphate
  modified_base 5: mod_base = OTHER; note = 2'-O-methylcytidine-3'-phosphate
  modified_base 6: mod_base = OTHER; note = 2'-O-methyluridine-3'-phosphate
  modified_base 7: mod_base = OTHER; note = 2'-deoxy-2'-fluoroguanosine-3'-phosphate
  modified_base 8: mod_base = OTHER; note = 2'-O-methyladenosine-3'-phosphate
  modified_base 9: mod_base = OTHER; note = 2'-deoxy-2'-fluoroguanosine-3'-phosphate
  modified_base 10: mod_base = OTHER; note = 2'-deoxy-2'-fluorouridine-3'-phosphate
  modified_base 11: mod_base = OTHER; note = 2'-deoxy-2'-fluorouridine-3'-phosphate
  modified_base 12: mod_base = OTHER; note = 2'-O-methylguanosine-3'-phosphate
  modified_base 13: mod_base = OTHER; note = 2'-O-methylguanosine-3'-phosphate
  modified_base 14: mod_base = OTHER; note = 2'-O-methyluridine-3'-phosphate
  modified_base 15: mod_base = OTHER; note = 2'-O-methyluridine-3'-phosphate
  modified_base 16: mod_base = OTHER; note = 2'-O-methyluridine-3'-phosphate
  modified_base 17: mod_base = OTHER; note = 2'-O-methyluridine-3'-phosphate
  modified_base 18: mod_base = OTHER; note = 2'-O-methyladenosine-3'-phosphate
  modified_base 19: mod_base = OTHER; note = 2'-O-methyluridine-3'-phosphate
  modified_base 20: mod_base = OTHER; note = 2'-O-methylguanosine-3'-phosphate
  modified_base 21: mod_base = OTHER; note = 2'-O-methyluridine-3'-phosphate ((2S,4R)-1-[29-[[2-(acetylamino)-2-deoxy-beta-D-galactopyra nosyl]oxy]-14,14-bis[[3-[[3-[[5-[[2-(acetylamino)-2-deoxy-b eta-D-galactopyranosyl]oxy]-1-oxopentyl]amino]propyl]amino] -3-oxopropoxy]methyl]-1,12,19,25-tetraoxo-16-oxa-13,20,24-t riazanonacos-1-yl]-4-hydroxy-2-pyrrolidinyl)methyl ester
tgagctgagttggttttatgt

SEQ ID NO: 777 - RNA, 21 nt, synthetic construct
  source 1..21: mol_type = other RNA
  modified_base 1: mod_base = OTHER; note = 2'-O-methylguanosine-3'-phosphorothioate
  modified_base 2: mod_base = OTHER; note = 2'-O-methyladenosine-3'-phosphorothioate
  modified_base 3: mod_base = OTHER; note = 2'-O-methylguanosine-3'-phosphate
  modified_base 4: mod_base = OTHER; note = 2'-O-methylcytidine-3'-phosphate
  modified_base 5: mod_base = OTHER; note = 2'-O-methyluridine-3'-phosphate
  modified_base 6: mod_base = OTHER; note = 2'-O-methylguanosine-3'-phosphate
  modified_base 7: mod_base = OTHER; note = 2'-deoxy-2'-fluoroadenosine-3'-phosphate
  modified_base 8: mod_base = OTHER; note = 2'-O-methylguanosine-3'-phosphate
  modified_base 9: mod_base = OTHER; note = 2'-deoxy-2'-fluorouridine-3'-phosphate
  modified_base 10: mod_base = OTHER; note = 2'-deoxy-2'-fluorouridine-3'-phosphate
  modified_base 11: mod_base = OTHER; note = 2'-deoxy-2'-fluoroguanosine-3'-phosphate
  modified_base 12: mod_base = OTHER; note = 2'-O-methylguanosine-3'-phosphate
  modified_base 13: mod_base = OTHER; note = 2'-O-methyluridine-3'-phosphate
  modified_base 14: mod_base = OTHER; note = 2'-O-methyluridine-3'-phosphate
  modified_base 15: mod_base = OTHER; note = 2'-O-methyluridine-3'-phosphate
  modified_base 16: mod_base = OTHER; note = 2'-O-methyluridine-3'-phosphate
  modified_base 17: mod_base = OTHER; note = 2'-O-methyladenosine-3'-phosphate
  modified_base 18: mod_base = OTHER; note = 2'-O-methyluridine-3'-phosphate
  modified_base 19: mod_base = OTHER; note = 2'-O-methylguanosine-3'-phosphate
  modified_base 20: mod_base = OTHER; note = 2'-O-methyladenosine-3'-phosphate
  modified_base 21: mod_base = OTHER; note = 2'-O-methyluridine-3'-phosphate ((2S,4R)-1-[29-[[2-(acetylamino)-2-deoxy-beta-D-galactopyra nosyl]oxy]-14,14-bis[[3-[[3-[[5-[[2-(acetylamino)-2-deoxy-b eta-D-galactopyranosyl]oxy]-1-oxopentyl]amino]propyl]amino] -3-oxopropoxy]methyl]-1,12,19,25-tetraoxo-16-oxa-13,20,24-t riazanonacos-1-yl]-4-hydroxy-2-pyrrolidinyl)methyl ester
gagctgagttggttttatgat

SEQ ID NO: 778 - RNA, 21 nt, synthetic construct
  source 1..21: mol_type = other RNA
  modified_base 1: mod_base = OTHER; note = 2'-O-methyladenosine-3'-phosphorothioate
  modified_base 2: mod_base = OTHER; note = 2'-O-methylguanosine-3'-phosphorothioate
  modified_base 3: mod_base = OTHER; note = 2'-O-methylcytidine-3'-phosphate
  modified_base 4: mod_base = OTHER; note = 2'-O-methyluridine-3'-phosphate
  modified_base 5: mod_base = OTHER; note = 2'-O-methylguanosine-3'-phosphate
  modified_base 6: mod_base = OTHER; note = 2'-O-methyladenosine-3'-phosphate
  modified_base 7: mod_base = OTHER; note = 2'-deoxy-2'-fluoroguanosine-3'-phosphate
  modified_base 8: mod_base = OTHER; note = 2'-O-methyluridine-3'-phosphate
  modified_base 9: mod_base = OTHER; note = 2'-deoxy-2'-fluorouridine-3'-phosphate
  modified_base 10: mod_base = OTHER; note = 2'-deoxy-2'-fluoroguanosine-3'-phosphate
  modified_base 11: mod_base = OTHER; note = 2'-deoxy-2'-fluoroguanosine-3'-phosphate
  modified_base 12: mod_base = OTHER; note = 2'-O-methyluridine-3'-phosphate
  modified_base 13: mod_base = OTHER; note = 2'-O-methyluridine-3'-phosphate
  modified_base 14: mod_base = OTHER; note = 2'-O-methyluridine-3'-phosphate
  modified_base 15: mod_base = OTHER; note = 2'-O-methyluridine-3'-phosphate
  modified_base 16: mod_base = OTHER; note = 2'-O-methyladenosine-3'-phosphate
  modified_base 17: mod_base = OTHER; note = 2'-O-methyluridine-3'-phosphate
  modified_base 18: mod_base = OTHER; note = 2'-O-methylguanosine-3'-phosphate
  modified_base 19: mod_base = OTHER; note = 2'-O-methyladenosine-3'-phosphate
  modified_base 20: mod_base = OTHER; note = 2'-O-methyladenosine-3'-phosphate
  modified_base 21: mod_base = OTHER; note = 2'-O-methyluridine-3'-phosphate ((2S,4R)-1-[29-[[2-(acetylamino)-2-deoxy-beta-D-galactopyra nosyl]oxy]-14,14-bis[[3-[[3-[[5-[[2-(acetylamino)-2-deoxy-b eta-D-galactopyranosyl]oxy]-1-oxopentyl]amino]propyl]amino] -3-oxopropoxy]methyl]-1,12,19,25-tetraoxo-16-oxa-13,20,24-t riazanonacos-1-yl]-4-hydroxy-2-pyrrolidinyl)methyl ester
agctgagttggttttatgaat

SEQ ID NO: 779 - RNA, 21 nt, synthetic construct
  source 1..21: mol_type = other RNA
  modified_base 1: mod_base = OTHER; note = 2'-O-methylguanosine-3'-phosphorothioate
  modified_base 2: mod_base = OTHER; note = 2'-O-methylcytidine-3'-phosphorothioate
  modified_base 3: mod_base = OTHER; note = 2'-O-methyluridine-3'-phosphate
  modified_base 4: mod_base = OTHER; note = 2'-O-methylguanosine-3'-phosphate
  modified_base 5: mod_base = OTHER; note = 2'-O-methyladenosine-3'-phosphate
  modified_base 6: mod_base = OTHER; note = 2'-O-methylguanosine-3'-phosphate
  modified_base 7: mod_base = OTHER; note = 2'-deoxy-2'-fluorouridine-3'-phosphate
  modified_base 8: mod_base = OTHER; note = 2'-O-methyluridine-3'-phosphate
  modified_base 9: mod_base = OTHER; note = 2'-deoxy-2'-fluoroguanosine-3'-phosphate
  modified_base 10: mod_base = OTHER; note = 2'-deoxy-2'-fluoroguanosine-3'-phosphate
  modified_base 11: mod_base = OTHER; note = 2'-deoxy-2'-fluorouridine-3'-phosphate
  modified_base 12: mod_base = OTHER; note = 2'-O-methyluridine-3'-phosphate
  modified_base 13: mod_base = OTHER; note = 2'-O-methyluridine-3'-phosphate
  modified_base 14: mod_base = OTHER; note = 2'-O-methyluridine-3'-phosphate
  modified_base 15: mod_base = OTHER; note = 2'-O-methyladenosine-3'-phosphate
  modified_base 16: mod_base = OTHER; note = 2'-O-methyluridine-3'-phosphate
  modified_base 17: mod_base = OTHER; note = 2'-O-methylguanosine-3'-phosphate
  modified_base 18: mod_base = OTHER; note = 2'-O-methyladenosine-3'-phosphate
  modified_base 19: mod_base = OTHER; note = 2'-O-methyladenosine-3'-phosphate
  modified_base 20: mod_base = OTHER; note = 2'-O-methyladenosine-3'-phosphate
  modified_base 21: mod_base = OTHER; note = 2'-O-methyluridine-3'-phosphate ((2S,4R)-1-[29-[[2-(acetylamino)-2-deoxy-beta-D-galactopyra nosyl]oxy]-14,14-bis[[3-[[3-[[5-[[2-(acetylamino)-2-deoxy-b eta-D-galactopyranosyl]oxy]-1-oxopentyl]amino]propyl]amino] -3-oxopropoxy]methyl]-1,12,19,25-tetraoxo-16-oxa-13,20,24-t riazanonacos-1-yl]-4-hydroxy-2-pyrrolidinyl)methyl ester
gctgagttggttttatgaaat

SEQ ID NO: 780 - RNA, 21 nt, synthetic construct
  source 1..21: mol_type = other RNA
  modified_base 1: mod_base = OTHER; note = 2'-O-methylcytidine-3'-phosphorothioate
  modified_base 2: mod_base = OTHER; note = 2'-O-methyluridine-3'-phosphorothioate
  modified_base 3: mod_base = OTHER; note = 2'-O-methylguanosine-3'-phosphate
  modified_base 4: mod_base = OTHER; note = 2'-O-methyladenosine-3'-phosphate
  modified_base 5: mod_base = OTHER; note = 2'-O-methylguanosine-3'-phosphate
  modified_base 6: mod_base = OTHER; note = 2'-O-methyluridine-3'-phosphate
  modified_base 7: mod_base = OTHER; note = 2'-deoxy-2'-fluorouridine-3'-phosphate
  modified_base 8: mod_base = OTHER; note = 2'-O-methylguanosine-3'-phosphate
  modified_base 9: mod_base = OTHER; note = 2'-deoxy-2'-fluoroguanosine-3'-phosphate
  modified_base 10: mod_base = OTHER; note = 2'-deoxy-2'-fluorouridine-3'-phosphate
  modified_base 11: mod_base = OTHER; note = 2'-deoxy-2'-fluorouridine-3'-phosphate
  modified_base 12: mod_base = OTHER; note = 2'-O-methyluridine-3'-phosphate
  modified_base 13: mod_base = OTHER; note = 2'-O-methyluridine-3'-phosphate
  modified_base 14: mod_base = OTHER; note = 2'-O-methyladenosine-3'-phosphate
  modified_base 15: mod_base = OTHER; note = 2'-O-methyluridine-3'-phosphate
  modified_base 16: mod_base = OTHER; note = 2'-O-methylguanosine-3'-phosphate
  modified_base 17: mod_base = OTHER; note = 2'-O-methyladenosine-3'-phosphate
  modified_base 18: mod_base = OTHER; note = 2'-O-methyladenosine-3'-phosphate
  modified_base 19: mod_base = OTHER; note = 2'-O-methyladenosine-3'-phosphate
  modified_base 20: mod_base = OTHER; note = 2'-O-methyladenosine-3'-phosphate
  modified_base 21: mod_base = OTHER; note = 2'-O-methyluridine-3'-phosphate ((2S,4R)-1-[29-[[2-(acetylamino)-2-deoxy-beta-D-galactopyra nosyl]oxy]-14,14-bis[[3-[[3-[[5-[[2-(acetylamino)-2-deoxy-b eta-D-galactopyranosyl]oxy]-1-oxopentyl]amino]propyl]amino] -3-oxopropoxy]methyl]-1,12,19,25-tetraoxo-16-oxa-13,20,24-t riazanonacos-1-yl]-4-hydroxy-2-pyrrolidinyl)methyl ester
ctgagttggttttatgaaaat

SEQ ID NO: 781 - RNA, 21 nt, synthetic construct
  source 1..21: mol_type = other RNA
  modified_base 1: mod_base = OTHER; note = 2'-O-methylguanosine-3'-phosphorothioate
  modified_base 2: mod_base = OTHER; note = 2'-O-methyladenosine-3'-phosphorothioate
  modified_base 3: mod_base = OTHER; note = 2'-O-methylguanosine-3'-phosphate
  modified_base 4: mod_base = OTHER; note = 2'-O-methyluridine-3'-phosphate
  modified_base 5: mod_base = OTHER; note = 2'-O-methyluridine-3'-phosphate
  modified_base 6: mod_base = OTHER; note = 2'-O-methylguanosine-3'-phosphate
  modified_base 7: mod_base = OTHER; note = 2'-deoxy-2'-fluoroguanosine-3'-phosphate
  modified_base 8: mod_base = OTHER; note = 2'-O-methyluridine-3'-phosphate
  modified_base 9: mod_base = OTHER; note = 2'-deoxy-2'-fluorouridine-3'-phosphate
  modified_base 10: mod_base = OTHER; note = 2'-deoxy-2'-fluorouridine-3'-phosphate
  modified_base 11: mod_base = OTHER; note = 2'-deoxy-2'-fluorouridine-3'-phosphate
  modified_base 12: mod_base = OTHER; note = 2'-O-methyladenosine-3'-phosphate
  modified_base 13: mod_base = OTHER; note = 2'-O-methyluridine-3'-phosphate
  modified_base 14: mod_base = OTHER; note = 2'-O-methylguanosine-3'-phosphate
  modified_base 15: mod_base = OTHER; note = 2'-O-methyladenosine-3'-phosphate
  modified_base 16: mod_base = OTHER; note = 2'-O-methyladenosine-3'-phosphate
  modified_base 17: mod_base = OTHER; note = 2'-O-methyladenosine-3'-phosphate
  modified_base 18: mod_base = OTHER; note = 2'-O-methyladenosine-3'-phosphate
  modified_base 19: mod_base = OTHER; note = 2'-O-methylguanosine-3'-phosphate
  modified_base 20: mod_base = OTHER; note = 2'-O-methylcytidine-3'-phosphate
  modified_base 21: mod_base = OTHER; note = 2'-O-methyluridine-3'-phosphate ((2S,4R)-1-[29-[[2-(acetylamino)-2-deoxy-beta-D-galactopyra nosyl]oxy]-14,14-bis[[3-[[3-[[5-[[2-(acetylamino)-2-deoxy-b eta-D-galactopyranosyl]oxy]-1-oxopentyl]amino]propyl]amino] -3-oxopropoxy]methyl]-1,12,19,25-tetraoxo-16-oxa-13,20,24-t riazanonacos-1-yl]-4-hydroxy-2-pyrrolidinyl)methyl ester
gagttggttttatgaaaagct

SEQ ID NO: 782 - RNA, 21 nt, synthetic construct
  source 1..21: mol_type = other RNA
  modified_base 1: mod_base = OTHER; note = 2'-O-methyladenosine-3'-phosphorothioate
  modified_base 2: mod_base = OTHER; note = 2'-O-methylguanosine-3'-phosphorothioate
  modified_base 3: mod_base = OTHER; note = 2'-O-methyluridine-3'-phosphate
  modified_base 4: mod_base = OTHER; note = 2'-O-methyluridine-3'-phosphate
  modified_base 5: mod_base = OTHER; note = 2'-O-methylguanosine-3'-phosphate
  modified_base 6: mod_base = OTHER; note = 2'-O-methylguanosine-3'-phosphate
  modified_base 7: mod_base = OTHER; note = 2'-deoxy-2'-fluorouridine-3'-phosphate
  modified_base 8: mod_base = OTHER; note = 2'-O-methyluridine-3'-phosphate
  modified_base 9: mod_base = OTHER; note = 2'-deoxy-2'-fluorouridine-3'-phosphate
  modified_base 10: mod_base = OTHER; note = 2'-deoxy-2'-fluorouridine-3'-phosphate
  modified_base 11: mod_base = OTHER; note = 2'-deoxy-2'-fluoroadenosine-3'-phosphate
  modified_base 12: mod_base = OTHER; note = 2'-O-methyluridine-3'-phosphate
  modified_base 13: mod_base = OTHER; note = 2'-O-methylguanosine-3'-phosphate
  modified_base 14: mod_base = OTHER; note = 2'-O-methyladenosine-3'-phosphate
  modified_base 15: mod_base = OTHER; note = 2'-O-methyladenosine-3'-phosphate
  modified_base 16: mod_base = OTHER; note = 2'-O-methyladenosine-3'-phosphate
  modified_base 17: mod_base = OTHER; note = 2'-O-methyladenosine-3'-phosphate
  modified_base 18: mod_base = OTHER; note = 2'-O-methylguanosine-3'-phosphate
  modified_base 19: mod_base = OTHER; note = 2'-O-methylcytidine-3'-phosphate
  modified_base 20: mod_base = OTHER; note = 2'-O-methyluridine-3'-phosphate
  modified_base 21: mod_base = OTHER; note = 2'-O-methyluridine-3'-phosphate ((2S,4R)-1-[29-[[2-(acetylamino)-2-deoxy-beta-D-galactopyra nosyl]oxy]-14,14-bis[[3-[[3-[[5-[[2-(acetylamino)-2-deoxy-b eta-D-galactopyranosyl]oxy]-1-oxopentyl]amino]propyl]amino] -3-oxopropoxy]methyl]-1,12,19,25-tetraoxo-16-oxa-13,20,24-t riazanonacos-1-yl]-4-hydroxy-2-pyrrolidinyl)methyl ester
agttggttttatgaaaagctt

SEQ ID NO: 783 - RNA, 21 nt, synthetic construct
  source 1..21: mol_type = other RNA
  modified_base 1: mod_base = OTHER; note = 2'-O-methylguanosine-3'-phosphorothioate
  modified_base 2: mod_base = OTHER; note = 2'-O-methyluridine-3'-phosphorothioate
  modified_base 3: mod_base = OTHER; note = 2'-O-methyluridine-3'-phosphate
  modified_base 4: mod_base = OTHER; note = 2'-O-methylguanosine-3'-phosphate
  modified_base 5: mod_base = OTHER; note = 2'-O-methylguanosine-3'-phosphate
  modified_base 6: mod_base = OTHER; note = 2'-O-methyluridine-3'-phosphate
  modified_base 7: mod_base = OTHER; note = 2'-deoxy-2'-fluorouridine-3'-phosphate
  modified_base 8: mod_base = OTHER; note = 2'-O-methyluridine-3'-phosphate
  modified_base 9: mod_base = OTHER; note = 2'-deoxy-2'-fluorouridine-3'-phosphate
  modified_base 10: mod_base = OTHER; note = 2'-deoxy-2'-fluoroadenosine-3'-phosphate
  modified_base 11: mod_base = OTHER; note = 2'-deoxy-2'-fluorouridine-3'-phosphate
  modified_base 12: mod_base = OTHER; note = 2'-O-methylguanosine-3'-phosphate
  modified_base 13: mod_base = OTHER; note = 2'-O-methyladenosine-3'-phosphate
  modified_base 14: mod_base = OTHER; note = 2'-O-methyladenosine-3'-phosphate
  modified_base 15: mod_base = OTHER; note = 2'-O-methyladenosine-3'-phosphate
  modified_base 16: mod_base = OTHER; note = 2'-O-methyladenosine-3'-phosphate
  modified_base 17: mod_base = OTHER; note = 2'-O-methylguanosine-3'-phosphate
  modified_base 18: mod_base = OTHER; note = 2'-O-methylcytidine-3'-phosphate
  modified_base 19: mod_base = OTHER; note = 2'-O-methyluridine-3'-phosphate
  modified_base 20: mod_base = OTHER; note = 2'-O-methyladenosine-3'-phosphate
  modified_base 21: mod_base = OTHER; note = 2'-O-methyluridine-3'-phosphate ((2S,4R)-1-[29-[[2-(acetylamino)-2-deoxy-beta-D-galactopyra nosyl]oxy]-14,14-bis[[3-[[3-[[5-[[2-(acetylamino)-2-deoxy-b eta-D-galactopyranosyl]oxy]-1-oxopentyl]amino]propyl]amino] -3-oxopropoxy]methyl]-1,12,19,25-tetraoxo-16-oxa-13,20,24-t riazanonacos-1-yl]-4-hydroxy-2-pyrrolidinyl)methyl ester
gttggttttatgaaaagctat

SEQ ID NO: 784 - RNA, 21 nt, synthetic construct
  source 1..21: mol_type = other RNA
  modified_base 1: mod_base = OTHER; note = 2'-O-methyluridine-3'-phosphorothioate
  modified_base 2: mod_base = OTHER; note = 2'-O-methyluridine-3'-phosphorothioate
  modified_base 3: mod_base = OTHER; note = 2'-O-methylguanosine-3'-phosphate
  modified_base 4: mod_base = OTHER; note = 2'-O-methylguanosine-3'-phosphate
  modified_base 5: mod_base = OTHER; note = 2'-O-methyluridine-3'-phosphate
  modified_base 6: mod_base = OTHER; note = 2'-O-methyluridine-3'-phosphate
  modified_base 7: mod_base = OTHER; note = 2'-deoxy-2'-fluorouridine-3'-phosphate
  modified_base 8: mod_base = OTHER; note = 2'-O-methyluridine-3'-phosphate
  modified_base 9: mod_base = OTHER; note = 2'-deoxy-2'-fluoroadenosine-3'-phosphate
  modified_base 10: mod_base = OTHER; note = 2'-deoxy-2'-fluorouridine-3'-phosphate
  modified_base 11: mod_base = OTHER; note = 2'-deoxy-2'-fluoroguanosine-3'-phosphate
  modified_base 12: mod_base = OTHER; note = 2'-O-methyladenosine-3'-phosphate
  modified_base 13: mod_base = OTHER; note = 2'-O-methyladenosine-3'-phosphate
  modified_base 14: mod_base = OTHER; note = 2'-O-methyladenosine-3'-phosphate
  modified_base 15: mod_base = OTHER; note = 2'-O-methyladenosine-3'-phosphate
  modified_base 16: mod_base = OTHER; note = 2'-O-methylguanosine-3'-phosphate
  modified_base 17: mod_base = OTHER; note = 2'-O-methylcytidine-3'-phosphate
  modified_base 18: mod_base = OTHER; note = 2'-O-methyluridine-3'-phosphate
  modified_base 19: mod_base = OTHER; note = 2'-O-methyladenosine-3'-phosphate
  modified_base 20: mod_base = OTHER; note = 2'-O-methylguanosine-3'-phosphate
  modified_base 21: mod_base = OTHER; note = 2'-O-methyluridine-3'-phosphate ((2S,4R)-1-[29-[[2-(acetylamino)-2-deoxy-beta-D-galactopyra nosyl]oxy]-14,14-bis[[3-[[3-[[5-[[2-(acetylamino)-2-deoxy-b eta-D-galactopyranosyl]oxy]-1-oxopentyl]amino]propyl]amino] -3-oxopropoxy]methyl]-1,12,19,25-tetraoxo-16-oxa-13,20,24-t riazanonacos-1-yl]-4-hydroxy-2-pyrrolidinyl)methyl ester
ttggttttatgaaaagctagt

SEQ ID NO: 785 - RNA, 21 nt, synthetic construct
  source 1..21: mol_type = other RNA
  modified_base 1: mod_base = OTHER; note = 2'-O-methyluridine-3'-phosphorothioate
  modified_base 2: mod_base = OTHER; note = 2'-O-methylguanosine-3'-phosphorothioate
  modified_base 3: mod_base = OTHER; note = 2'-O-methylguanosine-3'-phosphate
  modified_base 4: mod_base = OTHER; note = 2'-O-methyluridine-3'-phosphate
  modified_base 5: mod_base = OTHER; note = 2'-O-methyluridine-3'-phosphate
  modified_base 6: mod_base = OTHER; note = 2'-O-methyluridine-3'-phosphate
  modified_base 7: mod_base = OTHER; note = 2'-deoxy-2'-fluorouridine-3'-phosphate
  modified_base 8: mod_base = OTHER; note = 2'-O-methyladenosine-3'-phosphate
  modified_base 9: mod_base = OTHER; note = 2'-deoxy-2'-fluorouridine-3'-phosphate
  modified_base 10: mod_base = OTHER; note = 2'-deoxy-2'-fluoroguanosine-3'-phosphate
  modified_base 11: mod_base = OTHER; note = 2'-deoxy-2'-fluoroadenosine-3'-phosphate
  modified_base 12: mod_base = OTHER; note = 2'-O-methyladenosine-3'-phosphate
  modified_base 13: mod_base = OTHER; note = 2'-O-methyladenosine-3'-phosphate
  modified_base 14: mod_base = OTHER; note = 2'-O-methyladenosine-3'-phosphate
  modified_base 15: mod_base = OTHER; note = 2'-O-methylguanosine-3'-phosphate
  modified_base 16: mod_base = OTHER; note = 2'-O-methylcytidine-3'-phosphate
  modified_base 17: mod_base = OTHER; note = 2'-O-methyluridine-3'-phosphate
  modified_base 18: mod_base = OTHER; note = 2'-O-methyladenosine-3'-phosphate
  modified_base 19: mod_base = OTHER; note = 2'-O-methylguanosine-3'-phosphate
  modified_base 20: mod_base = OTHER; note = 2'-O-methylguanosine-3'-phosphate
  modified_base 21: mod_base = OTHER; note = 2'-O-methyluridine-3'-phosphate ((2S,4R)-1-[29-[[2-(acetylamino)-2-deoxy-beta-D-galactopyra nosyl]oxy]-14,14-bis[[3-[[3-[[5-[[2-(acetylamino)-2-deoxy-b eta-D-galactopyranosyl]oxy]-1-oxopentyl]amino]propyl]amino] -3-oxopropoxy]methyl]-1,12,19,25-tetraoxo-16-oxa-13,20,24-t riazanonacos-1-yl]-4-hydroxy-2-pyrrolidinyl)methyl ester
tggttttatgaaaagctaggt

SEQ ID NO: 786 - RNA, 21 nt, synthetic construct
  source 1..21: mol_type = other RNA
  modified_base 1: mod_base = OTHER; note = 2'-O-methylguanosine-3'-phosphorothioate
  modified_base 2: mod_base = OTHER; note = 2'-O-methyluridine-3'-phosphorothioate
  modified_base 3: mod_base = OTHER; note = 2'-O-methyluridine-3'-phosphate
  modified_base 4: mod_base = OTHER; note = 2'-O-methyluridine-3'-phosphate
  modified_base 5: mod_base = OTHER; note = 2'-O-methyluridine-3'-phosphate
  modified_base 6: mod_base = OTHER; note = 2'-O-methyladenosine-3'-phosphate
  modified_base 7: mod_base = OTHER; note = 2'-deoxy-2'-fluorouridine-3'-phosphate
  modified_base 8: mod_base = OTHER; note = 2'-O-methylguanosine-3'-phosphate
  modified_base 9: mod_base = OTHER; note = 2'-deoxy-2'-fluoroadenosine-3'-phosphate
  modified_base 10: mod_base = OTHER; note = 2'-deoxy-2'-fluoroadenosine-3'-phosphate
  modified_base 11: mod_base = OTHER; note = 2'-deoxy-2'-fluoroadenosine-3'-phosphate
  modified_base 12: mod_base = OTHER; note = 2'-O-methyladenosine-3'-phosphate
  modified_base 13: mod_base = OTHER; note = 2'-O-methylguanosine-3'-phosphate
  modified_base 14: mod_base = OTHER; note = 2'-O-methylcytidine-3'-phosphate
  modified_base 15: mod_base = OTHER; note = 2'-O-methyluridine-3'-phosphate
  modified_base 16: mod_base = OTHER; note = 2'-O-methyladenosine-3'-phosphate
  modified_base 17: mod_base = OTHER; note = 2'-O-methylguanosine-3'-phosphate
  modified_base 18: mod_base = OTHER; note = 2'-O-methylguanosine-3'-phosphate
  modified_base 19: mod_base = OTHER; note = 2'-O-methyladenosine-3'-phosphate
  modified_base 20: mod_base = OTHER; note = 2'-O-methyladenosine-3'-phosphate
  modified_base 21: mod_base = OTHER; note = 2'-O-methyluridine-3'-phosphate ((2S,4R)-1-[29-[[2-(acetylamino)-2-deoxy-beta-D-galactopyra nosyl]oxy]-14,14-bis[[3-[[3-[[5-[[2-(acetylamino)-2-deoxy-b eta-D-galactopyranosyl]oxy]-1-oxopentyl]amino]propyl]amino] -3-oxopropoxy]methyl]-1,12,19,25-tetraoxo-16-oxa-13,20,24-t riazanonacos-1-yl]-4-hydroxy-2-pyrrolidinyl)methyl ester
gttttatgaaaagctaggaat

SEQ ID NO: 787 - RNA, 21 nt, synthetic construct
  source 1..21: mol_type = other RNA
  modified_base 1: mod_base = OTHER; note = 2'-O-methyluridine-3'-phosphorothioate
  modified_base 2: mod_base = OTHER; note = 2'-O-methyluridine-3'-phosphorothioate
  modified_base 3: mod_base = OTHER; note = 2'-O-methyluridine-3'-phosphate
  modified_base 4: mod_base = OTHER; note = 2'-O-methyluridine-3'-phosphate
  modified_base 5: mod_base = OTHER; note = 2'-O-methyladenosine-3'-phosphate
  modified_base 6: mod_base = OTHER; note = 2'-O-methyluridine-3'-phosphate
  modified_base 7: mod_base = OTHER; note = 2'-deoxy-2'-fluoroguanosine-3'-phosphate
  modified_base 8: mod_base = OTHER; note = 2'-O-methyladenosine-3'-phosphate
  modified_base 9: mod_base = OTHER; note = 2'-deoxy-2'-fluoroadenosine-3'-phosphate
  modified_base 10: mod_base = OTHER; note = 2'-deoxy-2'-fluoroadenosine-3'-phosphate
  modified_base 11: mod_base = OTHER; note = 2'-deoxy-2'-fluoroadenosine-3'-phosphate
  modified_base 12: mod_base = OTHER; note = 2'-O-methylguanosine-3'-phosphate
  modified_base 13: mod_base = OTHER; note = 2'-O-methylcytidine-3'-phosphate
  modified_base 14: mod_base = OTHER; note = 2'-O-methyluridine-3'-phosphate
  modified_base 15: mod_base = OTHER; note = 2'-O-methyladenosine-3'-phosphate
  modified_base 16: mod_base = OTHER; note = 2'-O-methylguanosine-3'-phosphate
  modified_base 17: mod_base = OTHER; note = 2'-O-methylguanosine-3'-phosphate
  modified_base 18: mod_base = OTHER; note = 2'-O-methyladenosine-3'-phosphate
  modified_base 19: mod_base = OTHER; note = 2'-O-methyladenosine-3'-phosphate
  modified_base 20: mod_base = OTHER; note = 2'-O-methylguanosine-3'-phosphate
  modified_base 21: mod_base = OTHER; note = 2'-O-methyluridine-3'-phosphate ((2S,4R)-1-[29-[[2-(acetylamino)-2-deoxy-beta-D-galactopyra nosyl]oxy]-14,14-bis[[3-[[3-[[5-[[2-(acetylamino)-2-deoxy-b eta-D-galactopyranosyl]oxy]-1-oxopentyl]amino]propyl]amino] -3-oxopropoxy]methyl]-1,12,19,25-tetraoxo-16-oxa-13,20,24-t riazanonacos-1-yl]-4-hydroxy-2-pyrrolidinyl)methyl ester
ttttatgaaaagctaggaagt

SEQ ID NO: 788 - RNA, 21 nt, synthetic construct
  source 1..21: mol_type = other RNA
  modified_base 1: mod_base = OTHER; note = 2'-O-methyluridine-3'-phosphorothioate
  modified_base 2: mod_base = OTHER; note = 2'-O-methyladenosine-3'-phosphorothioate
  modified_base 3: mod_base = OTHER; note = 2'-O-methyluridine-3'-phosphate
  modified_base 4: mod_base = OTHER; note = 2'-O-methylguanosine-3'-phosphate
  modified_base 5: mod_base = OTHER; note = 2'-O-methyladenosine-3'-phosphate
  modified_base 6: mod_base = OTHER; note = 2'-O-methyladenosine-3'-phosphate
  modified_base 7: mod_base = OTHER; note = 2'-deoxy-2'-fluoroadenosine-3'-phosphate
  modified_base 8: mod_base = OTHER; note = 2'-O-methyladenosine-3'-phosphate
  modified_base 9: mod_base = OTHER; note = 2'-deoxy-2'-fluoroguanosine-3'-phosphate
  modified_base 10: mod_base = OTHER; note = 2'-deoxy-2'-fluorocytidine-3'-phosphate
  modified_base 11: mod_base = OTHER; note = 2'-deoxy-2'-fluorouridine-3'-phosphate
  modified_base 12: mod_base = OTHER; note = 2'-O-methyladenosine-3'-phosphate
  modified_base 13: mod_base = OTHER; note = 2'-O-methylguanosine-3'-phosphate
  modified_base 14: mod_base = OTHER; note = 2'-O-methylguanosine-3'-phosphate
  modified_base 15: mod_base = OTHER; note = 2'-O-methyladenosine-3'-phosphate
  modified_base 16: mod_base = OTHER; note = 2'-O-methyladenosine-3'-phosphate
  modified_base 17: mod_base = OTHER; note = 2'-O-methylguanosine-3'-phosphate
  modified_base 18: mod_base = OTHER; note = 2'-O-methylcytidine-3'-phosphate
  modified_base 19: mod_base = OTHER; note = 2'-O-methyladenosine-3'-phosphate
  modified_base 20: mod_base = OTHER; note = 2'-O-methyladenosine-3'-phosphate
  modified_base 21: mod_base = OTHER; note = 2'-O-methyluridine-3'-phosphate ((2S,4R)-1-[29-[[2-(acetylamino)-2-deoxy-beta-D-galactopyra nosyl]oxy]-14,14-bis[[3-[[3-[[5-[[2-(acetylamino)-2-deoxy-b eta-D-galactopyranosyl]oxy]-1-oxopentyl]amino]propyl]amino] -3-oxopropoxy]methyl]-1,12,19,25-tetraoxo-16-oxa-13,20,24-t riazanonacos-1-yl]-4-hydroxy-2-pyrrolidinyl)methyl ester
tatgaaaagctaggaagcaat

SEQ ID NO: 789 - RNA, 21 nt, synthetic construct
  source 1..21: mol_type = other RNA
  modified_base 1: mod_base = OTHER; note = 2'-O-methyladenosine-3'-phosphorothioate
  modified_base 2: mod_base = OTHER; note = 2'-O-methyluridine-3'-phosphorothioate
  modified_base 3: mod_base = OTHER; note = 2'-O-methyluridine-3'-phosphate
  modified_base 4: mod_base = OTHER; note = 2'-O-methylcytidine-3'-phosphate
  modified_base 5: mod_base = OTHER; note = 2'-O-methyladenosine-3'-phosphate
  modified_base 6: mod_base = OTHER; note = 2'-O-methylguanosine-3'-phosphate
  modified_base 7: mod_base = OTHER; note = 2'-deoxy-2'-fluorocytidine-3'-phosphate
  modified_base 8: mod_base = OTHER; note = 2'-O-methyluridine-3'-phosphate
  modified_base 9: mod_base = OTHER; note = 2'-deoxy-2'-fluoroguanosine-3'-phosphate
  modified_base 10: mod_base = OTHER; note = 2'-deoxy-2'-fluoroguanosine-3'-phosphate
  modified_base 11: mod_base = OTHER; note = 2'-deoxy-2'-fluorouridine-3'-phosphate
  modified_base 12: mod_base = OTHER; note = 2'-O-methyluridine-3'-phosphate
  modified_base 13: mod_base = OTHER; note = 2'-O-methylguanosine-3'-phosphate
  modified_base 14: mod_base = OTHER; note = 2'-O-methylguanosine-3'-phosphate
  modified_base 15: mod_base = OTHER; note = 2'-O-methylguanosine-3'-phosphate
  modified_base 16: mod_base = OTHER; note = 2'-O-methyladenosine-3'-phosphate
  modified_base 17: mod_base = OTHER; note = 2'-O-methyladenosine-3'-phosphate
  modified_base 18: mod_base = OTHER; note = 2'-O-methyladenosine-3'-phosphate
  modified_base 19: mod_base = OTHER; note = 2'-O-methyluridine-3'-phosphate
  modified_base 20: mod_base = OTHER; note = 2'-O-methylguanosine-3'-phosphate
  modified_base 21: mod_base = OTHER; note = 2'-O-methyluridine-3'-phosphate ((2S,4R)-1-[29-[[2-(acetylamino)-2-deoxy-beta-D-galactopyra nosyl]oxy]-14,14-bis[[3-[[3-[[5-[[2-(acetylamino)-2-deoxy-b eta-D-galactopyranosyl]oxy]-1-oxopentyl]amino]propyl]amino] -3-oxopropoxy]methyl]-1,12,19,25-tetraoxo-16-oxa-13,20,24-t riazanonacos-1-yl]-4-hydroxy-2-pyrrolidinyl)methyl ester
attcagctggttgggaaatgt

SEQ ID NO: 790 - RNA, 21 nt, synthetic construct
  source 1..21: mol_type = other RNA
  modified_base 1: mod_base = OTHER; note = 2'-O-methylcytidine-3'-phosphorothioate
  modified_base 2: mod_base = OTHER; note = 2'-O-methyladenosine-3'-phosphorothioate
  modified_base 3: mod_base = OTHER; note = 2'-O-methylguanosine-3'-phosphate
  modified_base 4: mod_base = OTHER; note = 2'-O-methylcytidine-3'-phosphate
  modified_base 5: mod_base = OTHER; note = 2'-O-methyluridine-3'-phosphate
  modified_base 6: mod_base = OTHER; note = 2'-O-methylguanosine-3'-phosphate
  modified_base 7: mod_base = OTHER; note = 2'-deoxy-2'-fluoroguanosine-3'-phosphate
  modified_base 8: mod_base = OTHER; note = 2'-O-methyluridine-3'-phosphate
  modified_base 9: mod_base = OTHER; note = 2'-deoxy-2'-fluorouridine-3'-phosphate
  modified_base 10: mod_base = OTHER; note = 2'-deoxy-2'-fluoroguanosine-3'-phosphate
  modified_base 11: mod_base = OTHER; note = 2'-deoxy-2'-fluoroguanosine-3'-phosphate
  modified_base 12: mod_base = OTHER; note = 2'-O-methylguanosine-3'-phosphate
  modified_base 13: mod_base = OTHER; note = 2'-O-methyladenosine-3'-phosphate
  modified_base 14: mod_base = OTHER; note = 2'-O-methyladenosine-3'-phosphate
  modified_base 15: mod_base = OTHER; note = 2'-O-methyladenosine-3'-phosphate
  modified_base 16: mod_base = OTHER; note = 2'-O-methyluridine-3'-phosphate
  modified_base 17: mod_base = OTHER; note = 2'-O-methylguanosine-3'-phosphate
  modified_base 18: mod_base = OTHER; note = 2'-O-methyladenosine-3'-phosphate
  modified_base 19: mod_base = OTHER; note = 2'-O-methylcytidine-3'-phosphate
  modified_base 20: mod_base = OTHER; note = 2'-O-methyladenosine-3'-phosphate
  modified_base 21: mod_base = OTHER; note = 2'-O-methyluridine-3'-phosphate ((2S,4R)-1-[29-[[2-(acetylamino)-2-deoxy-beta-D-galactopyra nosyl]oxy]-14,14-bis[[3-[[3-[[5-[[2-(acetylamino)-2-deoxy-b eta-D-galactopyranosyl]oxy]-1-oxopentyl]amino]propyl]amino] -3-oxopropoxy]methyl]-1,12,19,25-tetraoxo-16-oxa-13,20,24-t riazanonacos-1-yl]-4-hydroxy-2-pyrrolidinyl)methyl ester
cagctggttgggaaatgacat

SEQ ID NO: 791 - RNA, 21 nt, synthetic construct
  source 1..21: mol_type = other RNA
  modified_base 1: mod_base = OTHER; note = 2'-O-methyladenosine-3'-phosphorothioate
  modified_base 2: mod_base = OTHER; note = 2'-O-methylguanosine-3'-phosphorothioate
  modified_base 3: mod_base = OTHER; note = 2'-O-methylcytidine-3'-phosphate
  modified_base 4: mod_base = OTHER; note = 2'-O-methyluridine-3'-phosphate
  modified_base 5: mod_base = OTHER; note = 2'-O-methylguanosine-3'-phosphate
  modified_base 6: mod_base = OTHER; note = 2'-O-methylguanosine-3'-phosphate
  modified_base 7: mod_base = OTHER; note = 2'-deoxy-2'-fluorouridine-3'-phosphate
  modified_base 8: mod_base = OTHER; note = 2'-O-methyluridine-3'-phosphate
  modified_base 9: mod_base = OTHER; note = 2'-deoxy-2'-fluoroguanosine-3'-phosphate
  modified_base 10: mod_base = OTHER; note = 2'-deoxy-2'-fluoroguanosine-3'-phosphate
  modified_base 11: mod_base = OTHER; note = 2'-deoxy-2'-fluoroguanosine-3'-phosphate
  modified_base 12: mod_base = OTHER; note = 2'-O-methyladenosine-3'-phosphate
  modified_base 13: mod_base = OTHER; note = 2'-O-methyladenosine-3'-phosphate
  modified_base 14: mod_base = OTHER; note = 2'-O-methyladenosine-3'-phosphate
  modified_base 15: mod_base = OTHER; note = 2'-O-methyluridine-3'-phosphate
  modified_base 16: mod_base = OTHER; note = 2'-O-methylguanosine-3'-phosphate
  modified_base 17: mod_base = OTHER; note = 2'-O-methyladenosine-3'-phosphate
  modified_base 18: mod_base = OTHER; note = 2'-O-methylcytidine-3'-phosphate
  modified_base 19: mod_base = OTHER; note = 2'-O-methyladenosine-3'-phosphate
  modified_base 20: mod_base = OTHER; note = 2'-O-methylcytidine-3'-phosphate
  modified_base 21: mod_base = OTHER; note = 2'-O-methyluridine-3'-phosphate ((2S,4R)-1-[29-[[2-(acetylamino)-2-deoxy-beta-D-galactopyra nosyl]oxy]-14,14-bis[[3-[[3-[[5-[[2-(acetylamino)-2-deoxy-b eta-D-galactopyranosyl]oxy]-1-oxopentyl]amino]propyl]amino] -3-oxopropoxy]methyl]-1,12,19,25-tetraoxo-16-oxa-13,20,24-t riazanonacos-1-yl]-4-hydroxy-2-pyrrolidinyl)methyl ester
agctggttgggaaatgacact

SEQ ID NO: 792 - RNA, 21 nt, synthetic construct
  source 1..21: mol_type = other RNA
  modified_base 1: mod_base = OTHER; note = 2'-O-methylguanosine-3'-phosphorothioate
  modified_base 2: mod_base = OTHER; note = 2'-O-methyluridine-3'-phosphorothioate
  modified_base 3: mod_base = OTHER; note = 2'-O-methylguanosine-3'-phosphate
  modified_base 4: mod_base = OTHER; note = 2'-O-methylcytidine-3'-phosphate
  modified_base 5: mod_base = OTHER; note = 2'-O-methyladenosine-3'-phosphate
  modified_base 6: mod_base = OTHER; note = 2'-O-methylguanosine-3'-phosphate
  modified_base 7: mod_base = OTHER; note = 2'-deoxy-2'-fluoroadenosine-3'-phosphate
  modified_base 8: mod_base = OTHER; note = 2'-O-methylguanosine-3'-phosphate
  modified_base 9: mod_base = OTHER; note = 2'-deoxy-2'-fluoroguanosine-3'-phosphate
  modified_base 10: mod_base = OTHER; note = 2'-deoxy-2'-fluoroguanosine-3'-phosphate
  modified_base 11: mod_base = OTHER; note = 2'-deoxy-2'-fluorouridine-3'-phosphate
  modified_base 12: mod_base = OTHER; note = 2'-O-methylcytidine-3'-phosphate
  modified_base 13: mod_base = OTHER; note = 2'-O-methylcytidine-3'-phosphate
  modified_base 14: mod_base = OTHER; note = 2'-O-methylcytidine-3'-phosphate
  modified_base 15: mod_base = OTHER; note = 2'-O-methyluridine-3'-phosphate
  modified_base 16: mod_base = OTHER; note = 2'-O-methyluridine-3'-phosphate
  modified_base 17: mod_base = OTHER; note = 2'-O-methyladenosine-3'-phosphate
  modified_base 18: mod_base = OTHER; note = 2'-O-methylcytidine-3'-phosphate
  modified_base 19: mod_base = OTHER; note = 2'-O-methyluridine-3'-phosphate
  modified_base 20: mod_base = OTHER; note = 2'-O-methylguanosine-3'-phosphate
  modified_base 21: mod_base = OTHER; note = 2'-O-methyluridine-3'-phosphate ((2S,4R)-1-[29-[[2-(acetylamino)-2-deoxy-beta-D-galactopyra nosyl]oxy]-14,14-bis[[3-[[3-[[5-[[2-(acetylamino)-2-deoxy-b eta-D-galactopyranosyl]oxy]-1-oxopentyl]amino]propyl]amino] -3-oxopropoxy]methyl]-1,12,19,25-tetraoxo-16-oxa-13,20,24-t riazanonacos-1-yl]-4-hydroxy-2-pyrrolidinyl)methyl ester
gtgcagagggtcccttactgt

SEQ ID NO: 793 - RNA, 21 nt, synthetic construct
  source 1..21: mol_type = other RNA
  modified_base 1: mod_base = OTHER; note = 2'-O-methyluridine-3'-phosphorothioate
  modified_base 2: mod_base = OTHER; note = 2'-O-methylguanosine-3'-phosphorothioate
  modified_base 3: mod_base = OTHER; note = 2'-O-methylcytidine-3'-phosphate
  modified_base 4: mod_base = OTHER; note = 2'-O-methyladenosine-3'-phosphate
  modified_base 5: mod_base = OTHER; note = 2'-O-methylguanosine-3'-phosphate
  modified_base 6: mod_base = OTHER; note = 2'-O-methyladenosine-3'-phosphate
  modified_base 7: mod_base = OTHER; note = 2'-deoxy-2'-fluoroguanosine-3'-phosphate
  modified_base 8: mod_base = OTHER; note = 2'-O-methylguanosine-3'-phosphate
  modified_base 9: mod_base = OTHER; note = 2'-deoxy-2'-fluoroguanosine-3'-phosphate
  modified_base 10: mod_base = OTHER; note = 2'-deoxy-2'-fluorouridine-3'-phosphate
  modified_base 11: mod_base = OTHER; note = 2'-deoxy-2'-fluorocytidine-3'-phosphate
  modified_base 12: mod_base = OTHER; note = 2'-O-methylcytidine-3'-phosphate
  modified_base 13: mod_base = OTHER; note = 2'-O-methylcytidine-3'-phosphate
  modified_base 14: mod_base = OTHER; note = 2'-O-methyluridine-3'-phosphate
  modified_base 15: mod_base = OTHER; note = 2'-O-methyluridine-3'-phosphate
  modified_base 16: mod_base = OTHER; note = 2'-O-methyladenosine-3'-phosphate
  modified_base 17: mod_base = OTHER; note = 2'-O-methylcytidine-3'-phosphate
  modified_base 18: mod_base = OTHER; note = 2'-O-methyluridine-3'-phosphate
  modified_base 19: mod_base = OTHER; note = 2'-O-methylguanosine-3'-phosphate
  modified_base 20: mod_base = OTHER; note = 2'-O-methyladenosine-3'-phosphate
  modified_base 21: mod_base = OTHER; note = 2'-O-methyluridine-3'-phosphate ((2S,4R)-1-[29-[[2-(acetylamino)-2-deoxy-beta-D-galactopyra nosyl]oxy]-14,14-bis[[3-[[3-[[5-[[2-(acetylamino)-2-deoxy-b eta-D-galactopyranosyl]oxy]-1-oxopentyl]amino]propyl]amino] -3-oxopropoxy]methyl]-1,12,19,25-tetraoxo-16-oxa-13,20,24-t riazanonacos-1-yl]-4-hydroxy-2-pyrrolidinyl)methyl ester
tgcagagggtcccttactgat

SEQ ID NO: 794 - RNA, 21 nt, synthetic construct
  source 1..21: mol_type = other RNA
  modified_base 1: mod_base = OTHER; note = 2'-O-methylguanosine-3'-phosphorothioate
  modified_base 2: mod_base = OTHER; note = 2'-O-methylcytidine-3'-phosphorothioate
  modified_base 3: mod_base = OTHER; note = 2'-O-methyladenosine-3'-phosphate
  modified_base 4: mod_base = OTHER; note = 2'-O-methylguanosine-3'-phosphate
  modified_base 5: mod_base = OTHER; note = 2'-O-methyladenosine-3'-phosphate
  modified_base 6: mod_base = OTHER; note = 2'-O-methylguanosine-3'-phosphate
  modified_base 7: mod_base = OTHER; note = 2'-deoxy-2'-fluoroguanosine-3'-phosphate
  modified_base 8: mod_base = OTHER; note = 2'-O-methylguanosine-3'-phosphate
  modified_base 9: mod_base = OTHER; note = 2'-deoxy-2'-fluorouridine-3'-phosphate
  modified_base 10: mod_base = OTHER; note = 2'-deoxy-2'-fluorocytidine-3'-phosphate
  modified_base 11: mod_base = OTHER; note = 2'-deoxy-2'-fluorocytidine-3'-phosphate
  modified_base 12: mod_base = OTHER; note = 2'-O-methylcytidine-3'-phosphate
  modified_base 13: mod_base = OTHER; note = 2'-O-methyluridine-3'-phosphate
  modified_base 14: mod_base = OTHER; note = 2'-O-methyluridine-3'-phosphate
  modified_base 15: mod_base = OTHER; note = 2'-O-methyladenosine-3'-phosphate
  modified_base 16: mod_base = OTHER; note = 2'-O-methylcytidine-3'-phosphate
  modified_base 17: mod_base = OTHER; note = 2'-O-methyluridine-3'-phosphate
  modified_base 18: mod_base = OTHER; note = 2'-O-methylguanosine-3'-phosphate
  modified_base 19: mod_base = OTHER; note = 2'-O-methyladenosine-3'-phosphate
  modified_base 20: mod_base = OTHER; note = 2'-O-methylcytidine-3'-phosphate
  modified_base 21: mod_base = OTHER; note = 2'-O-methyluridine-3'-phosphate ((2S,4R)-1-[29-[[2-(acetylamino)-2-deoxy-beta-D-galactopyra nosyl]oxy]-14,14-bis[[3-[[3-[[5-[[2-(acetylamino)-2-deoxy-b eta-D-galactopyranosyl]oxy]-1-oxopentyl]amino]propyl]amino] -3-oxopropoxy]methyl]-1,12,19,25-tetraoxo-16-oxa-13,20,24-t riazanonacos-1-yl]-4-hydroxy-2-pyrrolidinyl)methyl ester
gcagagggtcccttactgact

SEQ ID NO: 795 - RNA, 21 nt, synthetic construct
  source 1..21: mol_type = other RNA
  modified_base 1: mod_base = OTHER; note = 2'-O-methyluridine-3'-phosphorothioate
  modified_base 2: mod_base = OTHER; note = 2'-O-methyluridine-3'-phosphorothioate
  modified_base 3: mod_base = OTHER; note = 2'-O-methyladenosine-3'-phosphate
  modified_base 4: mod_base = OTHER; note = 2'-O-methyladenosine-3'-phosphate
  modified_base 5: mod_base = OTHER; note = 2'-O-methyluridine-3'-phosphate
  modified_base 6: mod_base = OTHER; note = 2'-O-methylguanosine-3'-phosphate
  modified_base 7: mod_base = OTHER; note = 2'-deoxy-2'-fluoroguanosine-3'-phosphate
  modified_base 8: mod_base = OTHER; note = 2'-O-methyluridine-3'-phosphate
  modified_base 9: mod_base = OTHER; note = 2'-deoxy-2'-fluorocytidine-3'-phosphate
  modified_base 10: mod_base = OTHER; note = 2'-deoxy-2'-fluoroadenosine-3'-phosphate
  modified_base 11: mod_base = OTHER; note = 2'-deoxy-2'-fluoroguanosine-3'-phosphate
  modified_base 12: mod_base = OTHER; note = 2'-O-methyladenosine-3'-phosphate
  modified_base 13: mod_base = OTHER; note = 2'-O-methylcytidine-3'-phosphate
  modified_base 14: mod_base = OTHER; note = 2'-O-methyluridine-3'-phosphate
  modified_base 15: mod_base = OTHER; note = 2'-O-methylguanosine-3'-phosphate
  modified_base 16: mod_base = OTHER; note = 2'-O-methyluridine-3'-phosphate
  modified_base 17: mod_base = OTHER; note = 2'-O-methyluridine-3'-phosphate
  modified_base 18: mod_base = OTHER; note = 2'-O-methylcytidine-3'-phosphate
  modified_base 19: mod_base = OTHER; note = 2'-O-methylcytidine-3'-phosphate
  modified_base 20: mod_base = OTHER; note = 2'-O-methyladenosine-3'-phosphate
  modified_base 21: mod_base = OTHER; note = 2'-O-methyluridine-3'-phosphate ((2S,4R)-1-[29-[[2-(acetylamino)-2-deoxy-beta-D-galactopyra nosyl]oxy]-14,14-bis[[3-[[3-[[5-[[2-(acetylamino)-2-deoxy-b eta-D-galactopyranosyl]oxy]-1-oxopentyl]amino]propyl]amino] -3-oxopropoxy]methyl]-1,12,19,25-tetraoxo-16-oxa-13,20,24-t riazanonacos-1-yl]-4-hydroxy-2-pyrrolidinyl)methyl ester
ttaatggtcagactgttccat

SEQ ID NO: 796 - RNA, 21 nt, synthetic construct
  source 1..21: mol_type = other RNA
  modified_base 1: mod_base = OTHER; note = 2'-O-methyluridine-3'-phosphorothioate
  modified_base 2: mod_base = OTHER; note = 2'-O-methyladenosine-3'-phosphorothioate
  modified_base 3: mod_base = OTHER; note = 2'-O-methyladenosine-3'-phosphate
  modified_base 4: mod_base = OTHER; note = 2'-O-methyluridine-3'-phosphate
  modified_base 5: mod_base = OTHER; note = 2'-O-methylguanosine-3'-phosphate
  modified_base 6: mod_base = OTHER; note = 2'-O-methylguanosine-3'-phosphate
  modified_base 7: mod_base = OTHER; note = 2'-deoxy-2'-fluorouridine-3'-phosphate
  modified_base 8: mod_base = OTHER; note = 2'-O-methylcytidine-3'-phosphate
  modified_base 9: mod_base = OTHER; note = 2'-deoxy-2'-fluoroadenosine-3'-phosphate
  modified_base 10: mod_base = OTHER; note = 2'-deoxy-2'-fluoroguanosine-3'-phosphate
  modified_base 11: mod_base = OTHER; note = 2'-deoxy-2'-fluoroadenosine-3'-phosphate
  modified_base 12: mod_base = OTHER; note = 2'-O-methylcytidine-3'-phosphate
  modified_base 13: mod_base = OTHER; note = 2'-O-methyluridine-3'-phosphate
  modified_base 14: mod_base = OTHER; note = 2'-O-methylguanosine-3'-phosphate
  modified_base 15: mod_base = OTHER; note = 2'-O-methyluridine-3'-phosphate
  modified_base 16: mod_base = OTHER; note = 2'-O-methyluridine-3'-phosphate
  modified_base 17: mod_base = OTHER; note = 2'-O-methylcytidine-3'-phosphate
  modified_base 18: mod_base = OTHER; note = 2'-O-methylcytidine-3'-phosphate
  modified_base 19: mod_base = OTHER; note = 2'-O-methyladenosine-3'-phosphate
  modified_base 20: mod_base = OTHER; note = 2'-O-methylguanosine-3'-phosphate
  modified_base 21: mod_base = OTHER; note = 2'-O-methyluridine-3'-phosphate ((2S,4R)-1-[29-[[2-(acetylamino)-2-deoxy-beta-D-galactopyra nosyl]oxy]-14,14-bis[[3-[[3-[[5-[[2-(acetylamino)-2-deoxy-b eta-D-galactopyranosyl]oxy]-1-oxopentyl]amino]propyl]amino] -3-oxopropoxy]methyl]-1,12,19,25-tetraoxo-16-oxa-13,20,24-t riazanonacos-1-yl]-4-hydroxy-2-pyrrolidinyl)methyl ester
taatggtcagactgttccagt

SEQ ID NO: 797 - RNA, 21 nt, synthetic construct
  source 1..21: mol_type = other RNA
  modified_base 1: mod_base = OTHER; note = 2'-O-methyladenosine-3'-phosphorothioate
  modified_base 2: mod_base = OTHER; note = 2'-O-methylcytidine-3'-phosphorothioate
  modified_base 3: mod_base = OTHER; note = 2'-O-methylguanosine-3'-phosphate
  modified_base 4: mod_base = OTHER; note = 2'-O-methyladenosine-3'-phosphate
  modified_base 5: mod_base = OTHER; note = 2'-O-methylcytidine-3'-phosphate
  modified_base 6: mod_base = OTHER; note = 2'-O-methyladenosine-3'-phosphate
  modified_base 7: mod_base = OTHER; note = 2'-deoxy-2'-fluorocytidine-3'-phosphate
  modified_base 8: mod_base = OTHER; note = 2'-O-methyluridine-3'-phosphate
  modified_base 9: mod_base = OTHER; note = 2'-deoxy-2'-fluoroguanosine-3'-phosphate
  modified_base 10: mod_base = OTHER; note = 2'-deoxy-2'-fluorocytidine-3'-phosphate
  modified_base 11: mod_base = OTHER; note = 2'-deoxy-2'-fluorocytidine-3'-phosphate
  modified_base 12: mod_base = OTHER; note = 2'-O-methyluridine-3'-phosphate
  modified_base 13: mod_base = OTHER; note = 2'-O-methylguanosine-3'-phosphate
  modified_base 14: mod_base = OTHER; note = 2'-O-methyluridine-3'-phosphate
  modified_base 15: mod_base = OTHER; note = 2'-O-methylcytidine-3'-phosphate
  modified_base 16: mod_base = OTHER; note = 2'-O-methyladenosine-3'-phosphate
  modified_base 17: mod_base = OTHER; note = 2'-O-methylguanosine-3'-phosphate
  modified_base 18: mod_base = OTHER; note = 2'-O-methylguanosine-3'-phosphate
  modified_base 19: mod_base = OTHER; note = 2'-O-methyluridine-3'-phosphate
  modified_base 20: mod_base = OTHER; note = 2'-O-methylguanosine-3'-phosphate
  modified_base 21: mod_base = OTHER; note = 2'-O-methyluridine-3'-phosphate ((2S,4R)-1-[29-[[2-(acetylamino)-2-deoxy-beta-D-galactopyra nosyl]oxy]-14,14-bis[[3-[[3-[[5-[[2-(acetylamino)-2-deoxy-b eta-D-galactopyranosyl]oxy]-1-oxopentyl]amino]propyl]amino] -3-oxopropoxy]methyl]-1,12,19,25-tetraoxo-16-oxa-13,20,24-t riazanonacos-1-yl]-4-hydroxy-2-pyrrolidinyl)methyl ester
acgacactgcctgtcaggtgt

SEQ ID NO: 798 - RNA, 21 nt, synthetic construct
  source 1..21: mol_type = other RNA
  modified_base 1: mod_base = OTHER; note = 2'-O-methyladenosine-3'-phosphorothioate
  modified_base 2: mod_base = OTHER; note = 2'-O-methylcytidine-3'-phosphorothioate
  modified_base 3: mod_base = OTHER; note = 2'-O-methyladenosine-3'-phosphate
  modified_base 4: mod_base = OTHER; note = 2'-O-methylcytidine-3'-phosphate
  modified_base 5: mod_base = OTHER; note = 2'-O-methylcytidine-3'-phosphate
  modified_base 6: mod_base = OTHER; note = 2'-O-methyluridine-3'-phosphate
  modified_base 7: mod_base = OTHER; note = 2'-deoxy-2'-fluorouridine-3'-phosphate
  modified_base 8: mod_base = OTHER; note = 2'-O-methyluridine-3'-phosphate
  modified_base 9: mod_base = OTHER; note = 2'-deoxy-2'-fluorouridine-3'-phosphate
  modified_base 10: mod_base = OTHER; note = 2'-deoxy-2'-fluorouridine-3'-phosphate
  modified_base 11: mod_base = OTHER; note = 2'-deoxy-2'-fluorocytidine-3'-phosphate
  modified_base 12: mod_base = OTHER; note = 2'-O-methyladenosine-3'-phosphate
  modified_base 13: mod_base = OTHER; note = 2'-O-methylcytidine-3'-phosphate
  modified_base 14: mod_base = OTHER; note = 2'-O-methylcytidine-3'-phosphate
  modified_base 15: mod_base = OTHER; note = 2'-O-methyluridine-3'-phosphate
  modified_base 16: mod_base = OTHER; note = 2'-O-methyladenosine-3'-phosphate
  modified_base 17: mod_base = OTHER; note = 2'-O-methyladenosine-3'-phosphate
  modified_base 18: mod_base = OTHER; note = 2'-O-methylcytidine-3'-phosphate
  modified_base 19: mod_base = OTHER; note = 2'-O-methyluridine-3'-phosphate
  modified_base 20: mod_base = OTHER; note = 2'-O-methyladenosine-3'-phosphate
  modified_base 21: mod_base = OTHER; note = 2'-O-methyluridine-3'-phosphate ((2S,4R)-1-[29-[[2-(acetylamino)-2-deoxy-beta-D-galactopyra nosyl]oxy]-14,14-bis[[3-[[3-[[5-[[2-(acetylamino)-2-deoxy-b eta-D-galactopyranosyl]oxy]-1-oxopentyl]amino]propyl]amino] -3-oxopropoxy]methyl]-1,12,19,25-tetraoxo-16-oxa-13,20,24-t riazanonacos-1-yl]-4-hydroxy-2-pyrrolidinyl)methyl ester
acacctttttcacctaactat

SEQ ID NO: 799 - RNA, 21 nt, synthetic construct
  source 1..21: mol_type = other RNA
  modified_base 1: mod_base = OTHER; note = 2'-O-methylcytidine-3'-phosphorothioate
  modified_base 2: mod_base = OTHER; note = 2'-O-methyladenosine-3'-phosphorothioate
  modified_base 3: mod_base = OTHER; note = 2'-O-methylcytidine-3'-phosphate
  modified_base 4: mod_base = OTHER; note = 2'-O-methylcytidine-3'-phosphate
  modified_base 5: mod_base = OTHER; note = 2'-O-methyluridine-3'-phosphate
  modified_base 6: mod_base = OTHER; note = 2'-O-methyluridine-3'-phosphate
  modified_base 7: mod_base = OTHER; note = 2'-deoxy-2'-fluorouridine-3'-phosphate
  modified_base 8: mod_base = OTHER; note = 2'-O-methyluridine-3'-phosphate
  modified_base 9: mod_base = OTHER; note = 2'-deoxy-2'-fluorouridine-3'-phosphate
  modified_base 10: mod_base = OTHER; note = 2'-deoxy-2'-fluorocytidine-3'-phosphate
  modified_base 11: mod_base = OTHER; note = 2'-deoxy-2'-fluoroadenosine-3'-phosphate
  modified_base 12: mod_base = OTHER; note = 2'-O-methylcytidine-3'-phosphate
  modified_base 13: mod_base = OTHER; note = 2'-O-methylcytidine-3'-phosphate
  modified_base 14: mod_base = OTHER; note = 2'-O-methyluridine-3'-phosphate
  modified_base 15: mod_base = OTHER; note = 2'-O-methyladenosine-3'-phosphate
  modified_base 16: mod_base = OTHER; note = 2'-O-methyladenosine-3'-phosphate
  modified_base 17: mod_base = OTHER; note = 2'-O-methylcytidine-3'-phosphate
  modified_base 18: mod_base = OTHER; note = 2'-O-methyluridine-3'-phosphate
  modified_base 19: mod_base = OTHER; note = 2'-O-methyladenosine-3'-phosphate
  modified_base 20: mod_base = OTHER; note = 2'-O-methyladenosine-3'-phosphate
  modified_base 21: mod_base = OTHER; note = 2'-O-methyluridine-3'-phosphate ((2S,4R)-1-[29-[[2-(acetylamino)-2-deoxy-beta-D-galactopyra nosyl]oxy]-14,14-bis[[3-[[3-[[5-[[2-(acetylamino)-2-deoxy-b eta-D-galactopyranosyl]oxy]-1-oxopentyl]amino]propyl]amino] -3-oxopropoxy]methyl]-1,12,19,25-tetraoxo-16-oxa-13,20,24-t riazanonacos-1-yl]-4-hydroxy-2-pyrrolidinyl)methyl ester
cacctttttcacctaactaat

SEQ ID NO: 800 - RNA, 21 nt, synthetic construct
  source 1..21: mol_type = other RNA
  modified_base 1: mod_base = OTHER; note = 2'-O-methyladenosine-3'-phosphorothioate
  modified_base 2: mod_base = OTHER; note = 2'-O-methylcytidine-3'-phosphorothioate
  modified_base 3: mod_base = OTHER; note = 2'-O-methylcytidine-3'-phosphate
  modified_base 4: mod_base = OTHER; note = 2'-O-methyluridine-3'-phosphate
  modified_base 5: mod_base = OTHER; note = 2'-O-methyluridine-3'-phosphate
  modified_base 6: mod_base = OTHER; note = 2'-O-methyluridine-3'-phosphate
  modified_base 7: mod_base = OTHER; note = 2'-deoxy-2'-fluorouridine-3'-phosphate
  modified_base 8: mod_base = OTHER; note = 2'-O-methyluridine-3'-phosphate
  modified_base 9: mod_base = OTHER; note = 2'-deoxy-2'-fluorocytidine-3'-phosphate
  modified_base 10: mod_base = OTHER; note = 2'-deoxy-2'-fluoroadenosine-3'-phosphate
  modified_base 11: mod_base = OTHER; note = 2'-deoxy-2'-fluorocytidine-3'-phosphate
  modified_base 12: mod_base = OTHER; note = 2'-O-methylcytidine-3'-phosphate
  modified_base 13: mod_base = OTHER; note = 2'-O-methyluridine-3'-phosphate
  modified_base 14: mod_base = OTHER; note = 2'-O-methyladenosine-3'-phosphate
  modified_base 15: mod_base = OTHER; note = 2'-O-methyladenosine-3'-phosphate
  modified_base 16: mod_base = OTHER; note = 2'-O-methylcytidine-3'-phosphate
  modified_base 17: mod_base = OTHER; note = 2'-O-methyluridine-3'-phosphate
  modified_base 18: mod_base = OTHER; note = 2'-O-methyladenosine-3'-phosphate
  modified_base 19: mod_base = OTHER; note = 2'-O-methyladenosine-3'-phosphate
  modified_base 20: mod_base = OTHER; note = 2'-O-methyladenosine-3'-phosphate
  modified_base 21: mod_base = OTHER; note = 2'-O-methyluridine-3'-phosphate ((2S,4R)-1-[29-[[2-(acetylamino)-2-deoxy-beta-D-galactopyra nosyl]oxy]-14,14-bis[[3-[[3-[[5-[[2-(acetylamino)-2-deoxy-b eta-D-galactopyranosyl]oxy]-1-oxopentyl]amino]propyl]amino] -3-oxopropoxy]methyl]-1,12,19,25-tetraoxo-16-oxa-13,20,24-t riazanonacos-1-yl]-4-hydroxy-2-pyrrolidinyl)methyl ester
acctttttcacctaactaaat

SEQ ID NO: 801 - RNA, 21 nt, synthetic construct
  source 1..21: mol_type = other RNA
  modified_base 1: mod_base = OTHER; note = 2'-O-methylcytidine-3'-phosphorothioate
  modified_base 2: mod_base = OTHER; note = 2'-O-methyluridine-3'-phosphorothioate
  modified_base 3: mod_base = OTHER; note = 2'-O-methyluridine-3'-phosphate
  modified_base 4: mod_base = OTHER; note = 2'-O-methyluridine-3'-phosphate
  modified_base 5: mod_base = OTHER; note = 2'-O-methyluridine-3'-phosphate
  modified_base 6: mod_base = OTHER; note = 2'-O-methyluridine-3'-phosphate
  modified_base 7: mod_base = OTHER; note = 2'-deoxy-2'-fluorocytidine-3'-phosphate
  modified_base 8: mod_base = OTHER; note = 2'-O-methyladenosine-3'-phosphate
  modified_base 9: mod_base = OTHER; note = 2'-deoxy-2'-fluorocytidine-3'-phosphate
  modified_base 10: mod_base = OTHER; note = 2'-deoxy-2'-fluorocytidine-3'-phosphate
  modified_base 11: mod_base = OTHER; note = 2'-deoxy-2'-fluorouridine-3'-phosphate
  modified_base 12: mod_base = OTHER; note = 2'-O-methyladenosine-3'-phosphate
  modified_base 13: mod_base = OTHER; note = 2'-O-methyladenosine-3'-phosphate
  modified_base 14: mod_base = OTHER; note = 2'-O-methylcytidine-3'-phosphate
  modified_base 15: mod_base = OTHER; note = 2'-O-methyluridine-3'-phosphate
  modified_base 16: mod_base = OTHER; note = 2'-O-methyladenosine-3'-phosphate
  modified_base 17: mod_base = OTHER; note = 2'-O-methyladenosine-3'-phosphate
  modified_base 18: mod_base = OTHER; note = 2'-O-methyladenosine-3'-phosphate
  modified_base 19: mod_base = OTHER; note = 2'-O-methyladenosine-3'-phosphate
  modified_base 20: mod_base = OTHER; note = 2'-O-methyluridine-3'-phosphate
  modified_base 21: mod_base = OTHER; note = 2'-O-methyluridine-3'-phosphate ((2S,4R)-1-[29-[[2-(acetylamino)-2-deoxy-beta-D-galactopyra nosyl]oxy]-14,14-bis[[3-[[3-[[5-[[2-(acetylamino)-2-deoxy-b eta-D-galactopyranosyl]oxy]-1-oxopentyl]amino]propyl]amino] -3-oxopropoxy]methyl]-1,12,19,25-tetraoxo-16-oxa-13,20,24-t riazanonacos-1-yl]-4-hydroxy-2-pyrrolidinyl)methyl ester
ctttttcacctaactaaaatt

SEQ ID NO: 802 - RNA, 21 nt, synthetic construct
  source 1..21: mol_type = other RNA
  modified_base 1: mod_base = OTHER; note = 2'-O-methyluridine-3'-phosphorothioate
  modified_base 2: mod_base = OTHER; note = 2'-O-methyluridine-3'-phosphorothioate
  modified_base 3: mod_base = OTHER; note = 2'-O-methyluridine-3'-phosphate
  modified_base 4: mod_base = OTHER; note = 2'-O-methyluridine-3'-phosphate
  modified_base 5: mod_base = OTHER; note = 2'-O-methyluridine-3'-phosphate
  modified_base 6: mod_base = OTHER; note = 2'-O-methylcytidine-3'-phosphate
  modified_base 7: mod_base = OTHER; note = 2'-deoxy-2'-fluoroadenosine-3'-phosphate
  modified_base 8: mod_base = OTHER; note = 2'-O-methylcytidine-3'-phosphate
  modified_base 9: mod_base = OTHER; note = 2'-deoxy-2'-fluorocytidine-3'-phosphate
  modified_base 10: mod_base = OTHER; note = 2'-deoxy-2'-fluorouridine-3'-phosphate
  modified_base 11: mod_base = OTHER; note = 2'-deoxy-2'-fluoroadenosine-3'-phosphate
  modified_base 12: mod_base = OTHER; note = 2'-O-methyladenosine-3'-phosphate
  modified_base 13: mod_base = OTHER; note = 2'-O-methylcytidine-3'-phosphate
  modified_base 14: mod_base = OTHER; note = 2'-O-methyluridine-3'-phosphate
  modified_base 15: mod_base = OTHER; note = 2'-O-methyladenosine-3'-phosphate
  modified_base 16: mod_base = OTHER; note = 2'-O-methyladenosine-3'-phosphate
  modified_base 17: mod_base = OTHER; note = 2'-O-methyladenosine-3'-phosphate
  modified_base 18: mod_base = OTHER; note = 2'-O-methyladenosine-3'-phosphate
  modified_base 19: mod_base = OTHER; note = 2'-O-methyluridine-3'-phosphate
  modified_base 20: mod_base = OTHER; note = 2'-O-methyladenosine-3'-phosphate
  modified_base 21: mod_base = OTHER; note = 2'-O-methyluridine-3'-phosphate ((2S,4R)-1-[29-[[2-(acetylamino)-2-deoxy-beta-D-galactopyra nosyl]oxy]-14,14-bis[[3-[[3-[[5-[[2-(acetylamino)-2-deoxy-b eta-D-galactopyranosyl]oxy]-1-oxopentyl]amino]propyl]amino] -3-oxopropoxy]methyl]-1,12,19,25-tetraoxo-16-oxa-13,20,24-t riazanonacos-1-yl]-4-hydroxy-2-pyrrolidinyl)methyl ester
tttttcacctaactaaaatat

SEQ ID NO: 803 - RNA, 21 nt, synthetic construct
  source 1..21: mol_type = other RNA
  modified_base 1: mod_base = OTHER; note = 2'-O-methyluridine-3'-phosphorothioate
  modified_base 2: mod_base = OTHER; note = 2'-O-methyluridine-3'-phosphorothioate
  modified_base 3: mod_base = OTHER; note = 2'-O-methyluridine-3'-phosphate
  modified_base 4: mod_base = OTHER; note = 2'-O-methyluridine-3'-phosphate
  modified_base 5: mod_base = OTHER; note = 2'-O-methylcytidine-3'-phosphate
  modified_base 6: mod_base = OTHER; note = 2'-O-methyladenosine-3'-phosphate
  modified_base 7: mod_base = OTHER; note = 2'-deoxy-2'-fluorocytidine-3'-phosphate
  modified_base 8: mod_base = OTHER; note = 2'-O-methylcytidine-3'-phosphate
  modified_base 9: mod_base = OTHER; note = 2'-deoxy-2'-fluorouridine-3'-phosphate
  modified_base 10: mod_base = OTHER; note = 2'-deoxy-2'-fluoroadenosine-3'-phosphate
  modified_base 11: mod_base = OTHER; note = 2'-deoxy-2'-fluoroadenosine-3'-phosphate
  modified_base 12: mod_base = OTHER; note = 2'-O-methylcytidine-3'-phosphate
  modified_base 13: mod_base = OTHER; note = 2'-O-methyluridine-3'-phosphate
  modified_base 14: mod_base = OTHER; note = 2'-O-methyladenosine-3'-phosphate
  modified_base 15: mod_base = OTHER; note = 2'-O-methyladenosine-3'-phosphate
  modified_base 16: mod_base = OTHER; note = 2'-O-methyladenosine-3'-phosphate
  modified_base 17: mod_base = OTHER; note = 2'-O-methyladenosine-3'-phosphate
  modified_base 18: mod_base = OTHER; note = 2'-O-methyluridine-3'-phosphate
  modified_base 19: mod_base = OTHER; note = 2'-O-methyladenosine-3'-phosphate
  modified_base 20: mod_base = OTHER; note = 2'-O-methyladenosine-3'-phosphate
  modified_base 21: mod_base = OTHER; note = 2'-O-methyluridine-3'-phosphate ((2S,4R)-1-[29-[[2-(acetylamino)-2-deoxy-beta-D-galactopyra nosyl]oxy]-14,14-bis[[3-[[3-[[5-[[2-(acetylamino)-2-deoxy-b eta-D-galactopyranosyl]oxy]-1-oxopentyl]amino]propyl]amino] -3-oxopropoxy]methyl]-1,12,19,25-tetraoxo-16-oxa-13,20,24-t riazanonacos-1-yl]-4-hydroxy-2-pyrrolidinyl)methyl ester
ttttcacctaactaaaataat

SEQ ID NO: 804 - RNA, 21 nt, synthetic construct
  source 1..21: mol_type = other RNA
  modified_base 1: mod_base = OTHER; note = 2'-O-methyluridine-3'-phosphorothioate
  modified_base 2: mod_base = OTHER; note = 2'-O-methyluridine-3'-phosphorothioate
  modified_base 3: mod_base = OTHER; note = 2'-O-methyluridine-3'-phosphate
  modified_base 4: mod_base = OTHER; note = 2'-O-methylcytidine-3'-phosphate
  modified_base 5: mod_base = OTHER; note = 2'-O-methyladenosine-3'-phosphate
  modified_base 6: mod_base = OTHER; note = 2'-O-methylcytidine-3'-phosphate
  modified_base 7: mod_base = OTHER; note = 2'-deoxy-2'-fluorocytidine-3'-phosphate
  modified_base 8: mod_base = OTHER; note = 2'-O-methyluridine-3'-phosphate
  modified_base 9: mod_base = OTHER; note = 2'-deoxy-2'-fluoroadenosine-3'-phosphate
  modified_base 10: mod_base = OTHER; note = 2'-deoxy-2'-fluoroadenosine-3'-phosphate
  modified_base 11: mod_base = OTHER; note = 2'-deoxy-2'-fluorocytidine-3'-phosphate
  modified_base 12: mod_base = OTHER; note = 2'-O-methyluridine-3'-phosphate
  modified_base 13: mod_base = OTHER; note = 2'-O-methyladenosine-3'-phosphate
  modified_base 14: mod_base = OTHER; note = 2'-O-methyladenosine-3'-phosphate
  modified_base 15: mod_base = OTHER; note = 2'-O-methyladenosine-3'-phosphate
  modified_base 16: mod_base = OTHER; note = 2'-O-methyladenosine-3'-phosphate
  modified_base 17: mod_base = OTHER; note = 2'-O-methyluridine-3'-phosphate
  modified_base 18: mod_base = OTHER; note = 2'-O-methyladenosine-3'-phosphate
  modified_base 19: mod_base = OTHER; note = 2'-O-methyladenosine-3'-phosphate
  modified_base 20: mod_base = OTHER; note = 2'-O-methyluridine-3'-phosphate
  modified_base 21: mod_base = OTHER; note = 2'-O-methyluridine-3'-phosphate ((2S,4R)-1-[29-[[2-(acetylamino)-2-deoxy-beta-D-galactopyra nosyl]oxy]-14,14-bis[[3-[[3-[[5-[[2-(acetylamino)-2-deoxy-b eta-D-galactopyranosyl]oxy]-1-oxopentyl]amino]propyl]amino] -3-oxopropoxy]methyl]-1,12,19,25-tetraoxo-16-oxa-13,20,24-t riazanonacos-1-yl]-4-hydroxy-2-pyrrolidinyl)methyl ester
tttcacctaactaaaataatt

SEQ ID NO: 805 - RNA, 21 nt, synthetic construct
  source 1..21: mol_type = other RNA
  modified_base 1: mod_base = OTHER; note = 2'-O-methyluridine-3'-phosphorothioate
  modified_base 2: mod_base = OTHER; note = 2'-O-methyluridine-3'-phosphorothioate
  modified_base 3: mod_base = OTHER; note = 2'-O-methylcytidine-3'-phosphate
  modified_base 4: mod_base = OTHER; note = 2'-O-methyladenosine-3'-phosphate
  modified_base 5: mod_base = OTHER; note = 2'-O-methylcytidine-3'-phosphate
  modified_base 6: mod_base = OTHER; note = 2'-O-methylcytidine-3'-phosphate
  modified_base 7: mod_base = OTHER; note = 2'-deoxy-2'-fluorouridine-3'-phosphate
  modified_base 8: mod_base = OTHER; note = 2'-O-methyladenosine-3'-phosphate
  modified_base 9: mod_base = OTHER; note = 2'-deoxy-2'-fluoroadenosine-3'-phosphate
  modified_base 10: mod_base = OTHER; note = 2'-deoxy-2'-fluorocytidine-3'-phosphate
  modified_base 11: mod_base = OTHER; note = 2'-deoxy-2'-fluorouridine-3'-phosphate
  modified_base 12: mod_base = OTHER; note = 2'-O-methyladenosine-3'-phosphate
  modified_base 13: mod_base = OTHER; note = 2'-O-methyladenosine-3'-phosphate
  modified_base 14: mod_base = OTHER; note = 2'-O-methyladenosine-3'-phosphate
  modified_base 15: mod_base = OTHER; note = 2'-O-methyladenosine-3'-phosphate
  modified_base 16: mod_base = OTHER; note = 2'-O-methyluridine-3'-phosphate
  modified_base 17: mod_base = OTHER; note = 2'-O-methyladenosine-3'-phosphate
  modified_base 18: mod_base = OTHER; note = 2'-O-methyladenosine-3'-phosphate
  modified_base 19: mod_base = OTHER; note = 2'-O-methyluridine-3'-phosphate
  modified_base 20: mod_base = OTHER; note = 2'-O-methylguanosine-3'-phosphate
  modified_base 21: mod_base = OTHER; note = 2'-O-methyluridine-3'-phosphate ((2S,4R)-1-[29-[[2-(acetylamino)-2-deoxy-beta-D-galactopyra nosyl]oxy]-14,14-bis[[3-[[3-[[5-[[2-(acetylamino)-2-deoxy-b eta-D-galactopyranosyl]oxy]-1-oxopentyl]amino]propyl]amino] -3-oxopropoxy]methyl]-1,12,19,25-tetraoxo-16-oxa-13,20,24-t riazanonacos-1-yl]-4-hydroxy-2-pyrrolidinyl)methyl ester
ttcacctaactaaaataatgt

SEQ ID NO: 806 - RNA, 21 nt, synthetic construct
  source 1..21: mol_type = other RNA
  modified_base 1: mod_base = OTHER; note = 2'-O-methyluridine-3'-phosphorothioate
  modified_base 2: mod_base = OTHER; note = 2'-O-methylcytidine-3'-phosphorothioate
  modified_base 3: mod_base = OTHER; note = 2'-O-methyladenosine-3'-phosphate
  modified_base 4: mod_base = OTHER; note = 2'-O-methylcytidine-3'-phosphate
  modified_base 5: mod_base = OTHER; note = 2'-O-methylcytidine-3'-phosphate
  modified_base 6: mod_base = OTHER; note = 2'-O-methyluridine-3'-phosphate
  modified_base 7: mod_base = OTHER; note = 2'-deoxy-2'-fluoroadenosine-3'-phosphate
  modified_base 8: mod_base = OTHER; note = 2'-O-methyladenosine-3'-phosphate
  modified_base 9: mod_base = OTHER; note = 2'-deoxy-2'-fluorocytidine-3'-phosphate
  modified_base 10: mod_base = OTHER; note = 2'-deoxy-2'-fluorouridine-3'-phosphate
  modified_base 11: mod_base = OTHER; note = 2'-deoxy-2'-fluoroadenosine-3'-phosphate
  modified_base 12: mod_base = OTHER; note = 2'-O-methyladenosine-3'-phosphate
  modified_base 13: mod_base = OTHER; note = 2'-O-methyladenosine-3'-phosphate
  modified_base 14: mod_base = OTHER; note = 2'-O-methyladenosine-3'-phosphate
  modified_base 15: mod_base = OTHER; note = 2'-O-methyluridine-3'-phosphate
  modified_base 16: mod_base = OTHER; note = 2'-O-methyladenosine-3'-phosphate
  modified_base 17: mod_base = OTHER; note = 2'-O-methyladenosine-3'-phosphate
  modified_base 18: mod_base = OTHER; note = 2'-O-methyluridine-3'-phosphate
  modified_base 19: mod_base = OTHER; note = 2'-O-methylguanosine-3'-phosphate
  modified_base 20: mod_base = OTHER; note = 2'-O-methyluridine-3'-phosphate
  modified_base 21: mod_base = OTHER; note = 2'-O-methyluridine-3'-phosphate ((2S,4R)-1-[29-[[2-(acetylamino)-2-deoxy-beta-D-galactopyra nosyl]oxy]-14,14-bis[[3-[[3-[[5-[[2-(acetylamino)-2-deoxy-b eta-D-galactopyranosyl]oxy]-1-oxopentyl]amino]propyl]amino] -3-oxopropoxy]methyl]-1,12,19,25-tetraoxo-16-oxa-13,20,24-t riazanonacos-1-yl]-4-hydroxy-2-pyrrolidinyl)methyl ester
tcacctaactaaaataatgtt

SEQ ID NO: 807 - RNA, 21 nt, synthetic construct
  source 1..21: mol_type = other RNA
  modified_base 1: mod_base = OTHER; note = 2'-O-methylcytidine-3'-phosphorothioate
  modified_base 2: mod_base = OTHER; note = 2'-O-methyladenosine-3'-phosphorothioate
  modified_base 3: mod_base = OTHER; note = 2'-O-methylcytidine-3'-phosphate
  modified_base 4: mod_base = OTHER; note = 2'-O-methylcytidine-3'-phosphate
  modified_base 5: mod_base = OTHER; note = 2'-O-methyluridine-3'-phosphate
  modified_base 6: mod_base = OTHER; note = 2'-O-methyladenosine-3'-phosphate
  modified_base 7: mod_base = OTHER; note = 2'-deoxy-2'-fluoroadenosine-3'-phosphate
  modified_base 8: mod_base = OTHER; note = 2'-O-methylcytidine-3'-phosphate
  modified_base 9: mod_base = OTHER; note = 2'-deoxy-2'-fluorouridine-3'-phosphate
  modified_base 10: mod_base = OTHER; note = 2'-deoxy-2'-fluoroadenosine-3'-phosphate
  modified_base 11: mod_base = OTHER; note = 2'-deoxy-2'-fluoroadenosine-3'-phosphate
  modified_base 12: mod_base = OTHER; note = 2'-O-methyladenosine-3'-phosphate
  modified_base 13: mod_base = OTHER; note = 2'-O-methyladenosine-3'-phosphate
  modified_base 14: mod_base = OTHER; note = 2'-O-methyluridine-3'-phosphate
  modified_base 15: mod_base = OTHER; note = 2'-O-methyladenosine-3'-phosphate
  modified_base 16: mod_base = OTHER; note = 2'-O-methyladenosine-3'-phosphate
  modified_base 17: mod_base = OTHER; note = 2'-O-methyluridine-3'-phosphate
  modified_base 18: mod_base = OTHER; note = 2'-O-methylguanosine-3'-phosphate
  modified_base 19: mod_base = OTHER; note = 2'-O-methyluridine-3'-phosphate
  modified_base 20: mod_base = OTHER; note = 2'-O-methyluridine-3'-phosphate
  modified_base 21: mod_base = OTHER; note = 2'-O-methyluridine-3'-phosphate ((2S,4R)-1-[29-[[2-(acetylamino)-2-deoxy-beta-D-galactopyra nosyl]oxy]-14,14-bis[[3-[[3-[[5-[[2-(acetylamino)-2-deoxy-b eta-D-galactopyranosyl]oxy]-1-oxopentyl]amino]propyl]amino] -3-oxopropoxy]methyl]-1,12,19,25-tetraoxo-16-oxa-13,20,24-t riazanonacos-1-yl]-4-hydroxy-2-pyrrolidinyl)methyl ester
cacctaactaaaataatgttt

SEQ ID NO: 808 - RNA, 21 nt, synthetic construct
  source 1..21: mol_type = other RNA
  modified_base 1: mod_base = OTHER; note = 2'-O-methyladenosine-3'-phosphorothioate
  modified_base 2: mod_base = OTHER; note = 2'-O-methylcytidine-3'-phosphorothioate
  modified_base 3: mod_base = OTHER; note = 2'-O-methylcytidine-3'-phosphate
  modified_base 4: mod_base = OTHER; note = 2'-O-methyluridine-3'-phosphate
  modified_base 5: mod_base = OTHER; note = 2'-O-methyladenosine-3'-phosphate
  modified_base 6: mod_base = OTHER; note = 2'-O-methyladenosine-3'-phosphate
  modified_base 7: mod_base = OTHER; note = 2'-deoxy-2'-fluorocytidine-3'-phosphate
  modified_base 8: mod_base = OTHER; note = 2'-O-methyluridine-3'-phosphate
  modified_base 9: mod_base = OTHER; note = 2'-deoxy-2'-fluoroadenosine-3'-phosphate
  modified_base 10: mod_base = OTHER; note = 2'-deoxy-2'-fluoroadenosine-3'-phosphate
  modified_base 11: mod_base = OTHER; note = 2'-deoxy-2'-fluoroadenosine-3'-phosphate
  modified_base 12: mod_base = OTHER; note = 2'-O-methyladenosine-3'-phosphate
  modified_base 13: mod_base = OTHER; note = 2'-O-methyluridine-3'-phosphate
  modified_base 14: mod_base = OTHER; note = 2'-O-methyladenosine-3'-phosphate
  modified_base 15: mod_base = OTHER; note = 2'-O-methyladenosine-3'-phosphate
  modified_base 16: mod_base = OTHER; note = 2'-O-methyluridine-3'-phosphate
  modified_base 17: mod_base = OTHER; note = 2'-O-methylguanosine-3'-phosphate
  modified_base 18: mod_base = OTHER; note = 2'-O-methyluridine-3'-phosphate
  modified_base 19: mod_base = OTHER; note = 2'-O-methyluridine-3'-phosphate
  modified_base 20: mod_base = OTHER; note = 2'-O-methyluridine-3'-phosphate
  modified_base 21: mod_base = OTHER; note = 2'-O-methyluridine-3'-phosphate ((2S,4R)-1-[29-[[2-(acetylamino)-2-deoxy-beta-D-galactopyra nosyl]oxy]-14,14-bis[[3-[[3-[[5-[[2-(acetylamino)-2-deoxy-b eta-D-galactopyranosyl]oxy]-1-oxopentyl]amino]propyl]amino] -3-oxopropoxy]methyl]-1,12,19,25-tetraoxo-16-oxa-13,20,24-t riazanonacos-1-yl]-4-hydroxy-2-pyrrolidinyl)methyl ester
acctaactaaaataatgtttt

SEQ ID NO: 809 - RNA, 21 nt, synthetic construct
  source 1..21: mol_type = other RNA
  modified_base 1: mod_base = OTHER; note = 2'-O-methylcytidine-3'-phosphorothioate
  modified_base 2: mod_base = OTHER; note = 2'-O-methylcytidine-3'-phosphorothioate
  modified_base 3: mod_base = OTHER; note = 2'-O-methyluridine-3'-phosphate
  modified_base 4: mod_base = OTHER; note = 2'-O-methyladenosine-3'-phosphate
  modified_base 5: mod_base = OTHER; note = 2'-O-methyladenosine-3'-phosphate
  modified_base 6: mod_base = OTHER; note = 2'-O-methylcytidine-3'-phosphate
  modified_base 7: mod_base = OTHER; note = 2'-deoxy-2'-fluorouridine-3'-phosphate
  modified_base 8: mod_base = OTHER; note = 2'-O-methyladenosine-3'-phosphate
  modified_base 9: mod_base = OTHER; note = 2'-deoxy-2'-fluoroadenosine-3'-phosphate
  modified_base 10: mod_base = OTHER; note = 2'-deoxy-2'-fluoroadenosine-3'-phosphate
  modified_base 11: mod_base = OTHER; note = 2'-deoxy-2'-fluoroadenosine-3'-phosphate
  modified_base 12: mod_base = OTHER; note = 2'-O-methyluridine-3'-phosphate
  modified_base 13: mod_base = OTHER; note = 2'-O-methyladenosine-3'-phosphate
  modified_base 14: mod_base = OTHER; note = 2'-O-methyladenosine-3'-phosphate
  modified_base 15: mod_base = OTHER; note = 2'-O-methyluridine-3'-phosphate
  modified_base 16: mod_base = OTHER; note = 2'-O-methylguanosine-3'-phosphate
  modified_base 17: mod_base = OTHER; note = 2'-O-methyluridine-3'-phosphate
  modified_base 18: mod_base = OTHER; note = 2'-O-methyluridine-3'-phosphate
  modified_base 19: mod_base = OTHER; note = 2'-O-methyluridine-3'-phosphate
  modified_base 20: mod_base = OTHER; note = 2'-O-methyladenosine-3'-phosphate
  modified_base 21: mod_base = OTHER; note = 2'-O-methyluridine-3'-phosphate ((2S,4R)-1-[29-[[2-(acetylamino)-2-deoxy-beta-D-galactopyra nosyl]oxy]-14,14-bis[[3-[[3-[[5-[[2-(acetylamino)-2-deoxy-b eta-D-galactopyranosyl]oxy]-1-oxopentyl]amino]propyl]amino] -3-oxopropoxy]methyl]-1,12,19,25-tetraoxo-16-oxa-13,20,24-t riazanonacos-1-yl]-4-hydroxy-2-pyrrolidinyl)methyl ester
cctaactaaaataatgtttat

SEQ ID NO: 810 - RNA, 21 nt, synthetic construct
  source 1..21: mol_type = other RNA
  modified_base 1: mod_base = OTHER; note = 2'-O-methylcytidine-3'-phosphorothioate
  modified_base 2: mod_base = OTHER; note = 2'-O-methyluridine-3'-phosphorothioate
  modified_base 3: mod_base = OTHER; note = 2'-O-methyladenosine-3'-phosphate
  modified_base 4: mod_base = OTHER; note = 2'-O-methyladenosine-3'-phosphate
  modified_base 5: mod_base = OTHER; note = 2'-O-methylcytidine-3'-phosphate
  modified_base 6: mod_base = OTHER; note = 2'-O-methyluridine-3'-phosphate
  modified_base 7: mod_base = OTHER; note = 2'-deoxy-2'-fluoroadenosine-3'-phosphate
  modified_base 8: mod_base = OTHER; note = 2'-O-methyladenosine-3'-phosphate
  modified_base 9: mod_base = OTHER; note = 2'-deoxy-2'-fluoroadenosine-3'-phosphate
  modified_base 10: mod_base = OTHER; note = 2'-deoxy-2'-fluoroadenosine-3'-phosphate
  modified_base 11: mod_base = OTHER; note = 2'-deoxy-2'-fluorouridine-3'-phosphate
  modified_base 12: mod_base = OTHER; note = 2'-O-methyladenosine-3'-phosphate
  modified_base 13: mod_base = OTHER; note = 2'-O-methyladenosine-3'-phosphate
  modified_base 14: mod_base = OTHER; note = 2'-O-methyluridine-3'-phosphate
  modified_base 15: mod_base = OTHER; note = 2'-O-methylguanosine-3'-phosphate
  modified_base 16: mod_base = OTHER; note = 2'-O-methyluridine-3'-phosphate
  modified_base 17: mod_base = OTHER; note = 2'-O-methyluridine-3'-phosphate
  modified_base 18: mod_base = OTHER; note = 2'-O-methyluridine-3'-phosphate
  modified_base 19: mod_base = OTHER; note = 2'-O-methyladenosine-3'-phosphate
  modified_base 20: mod_base = OTHER; note = 2'-O-methyladenosine-3'-phosphate
  modified_base 21: mod_base = OTHER; note = 2'-O-methyluridine-3'-phosphate ((2S,4R)-1-[29-[[2-(acetylamino)-2-deoxy-beta-D-galactopyra nosyl]oxy]-14,14-bis[[3-[[3-[[5-[[2-(acetylamino)-2-deoxy-b eta-D-galactopyranosyl]oxy]-1-oxopentyl]amino]propyl]amino] -3-oxopropoxy]methyl]-1,12,19,25-tetraoxo-16-oxa-13,20,24-t riazanonacos-1-yl]-4-hydroxy-2-pyrrolidinyl)methyl ester
ctaactaaaataatgtttaat

SEQ ID NO: 811 - RNA, 21 nt, synthetic construct
  source 1..21: mol_type = other RNA
  modified_base 1: mod_base = OTHER; note = 2'-O-methyluridine-3'-phosphorothioate
  modified_base 2: mod_base = OTHER; note = 2'-O-methyladenosine-3'-phosphorothioate
  modified_base 3: mod_base = OTHER; note = 2'-O-methyladenosine-3'-phosphate
  modified_base 4: mod_base = OTHER; note = 2'-O-methylcytidine-3'-phosphate
  modified_base 5: mod_base = OTHER; note = 2'-O-methyluridine-3'-phosphate
  modified_base 6: mod_base = OTHER; note = 2'-O-methyladenosine-3'-phosphate
  modified_base 7: mod_base = OTHER; note = 2'-deoxy-2'-fluoroadenosine-3'-phosphate
  modified_base 8: mod_base = OTHER; note = 2'-O-methyladenosine-3'-phosphate
  modified_base 9: mod_base = OTHER; note = 2'-deoxy-2'-fluoroadenosine-3'-phosphate
  modified_base 10: mod_base = OTHER; note = 2'-deoxy-2'-fluorouridine-3'-phosphate
  modified_base 11: mod_base = OTHER; note = 2'-deoxy-2'-fluoroadenosine-3'-phosphate
  modified_base 12: mod_base = OTHER; note = 2'-O-methyladenosine-3'-phosphate
  modified_base 13: mod_base = OTHER; note = 2'-O-methyluridine-3'-phosphate
  modified_base 14: mod_base = OTHER; note = 2'-O-methylguanosine-3'-phosphate
  modified_base 15: mod_base = OTHER; note = 2'-O-methyluridine-3'-phosphate
  modified_base 16: mod_base = OTHER; note = 2'-O-methyluridine-3'-phosphate
  modified_base 17: mod_base = OTHER; note = 2'-O-methyluridine-3'-phosphate
  modified_base 18: mod_base = OTHER; note = 2'-O-methyladenosine-3'-phosphate
  modified_base 19: mod_base = OTHER; note = 2'-O-methyladenosine-3'-phosphate
  modified_base 20: mod_base = OTHER; note = 2'-O-methyladenosine-3'-phosphate
  modified_base 21: mod_base = OTHER; note = 2'-O-methyluridine-3'-phosphate ((2S,4R)-1-[29-[[2-(acetylamino)-2-deoxy-beta-D-galactopyra nosyl]oxy]-14,14-bis[[3-[[3-[[5-[[2-(acetylamino)-2-deoxy-b eta-D-galactopyranosyl]oxy]-1-oxopentyl]amino]propyl]amino] -3-oxopropoxy]methyl]-1,12,19,25-tetraoxo-16-oxa-13,20,24-t riazanonacos-1-yl]-4-hydroxy-2-pyrrolidinyl)methyl ester
taactaaaataatgtttaaat

SEQ ID NO: 812 - RNA, 21 nt, synthetic construct
  source 1..21: mol_type = other RNA
  modified_base 1: mod_base = OTHER; note = 2'-O-methyladenosine-3'-phosphorothioate
  modified_base 2: mod_base = OTHER; note = 2'-O-methyladenosine-3'-phosphorothioate
  modified_base 3: mod_base = OTHER; note = 2'-O-methylcytidine-3'-phosphate
  modified_base 4: mod_base = OTHER; note = 2'-O-methyluridine-3'-phosphate
  modified_base 5: mod_base = OTHER; note = 2'-O-methyladenosine-3'-phosphate
  modified_base 6: mod_base = OTHER; note = 2'-O-methyladenosine-3'-phosphate
  modified_base 7: mod_base = OTHER; note = 2'-deoxy-2'-fluoroadenosine-3'-phosphate
  modified_base 8: mod_base = OTHER; note = 2'-O-methyladenosine-3'-phosphate
  modified_base 9: mod_base = OTHER; note = 2'-deoxy-2'-fluorouridine-3'-phosphate
  modified_base 10: mod_base = OTHER; note = 2'-deoxy-2'-fluoroadenosine-3'-phosphate
  modified_base 11: mod_base = OTHER; note = 2'-deoxy-2'-fluoroadenosine-3'-phosphate
  modified_base 12: mod_base = OTHER; note = 2'-O-methyluridine-3'-phosphate
  modified_base 13: mod_base = OTHER; note = 2'-O-methylguanosine-3'-phosphate
  modified_base 14: mod_base = OTHER; note = 2'-O-methyluridine-3'-phosphate
  modified_base 15: mod_base = OTHER; note = 2'-O-methyluridine-3'-phosphate
  modified_base 16: mod_base = OTHER; note = 2'-O-methyluridine-3'-phosphate
  modified_base 17: mod_base = OTHER; note = 2'-O-methyladenosine-3'-phosphate
  modified_base 18: mod_base = OTHER; note = 2'-O-methyladenosine-3'-phosphate
  modified_base 19: mod_base = OTHER; note = 2'-O-methyladenosine-3'-phosphate
  modified_base 20: mod_base = OTHER; note = 2'-O-methylguanosine-3'-phosphate
  modified_base 21: mod_base = OTHER; note = 2'-O-methyluridine-3'-phosphate ((2S,4R)-1-[29-[[2-(acetylamino)-2-deoxy-beta-D-galactopyra nosyl]oxy]-14,14-bis[[3-[[3-[[5-[[2-(acetylamino)-2-deoxy-b eta-D-galactopyranosyl]oxy]-1-oxopentyl]amino]propyl]amino] -3-oxopropoxy]methyl]-1,12,19,25-tetraoxo-16-oxa-13,20,24-t riazanonacos-1-yl]-4-hydroxy-2-pyrrolidinyl)methyl ester
aactaaaataatgtttaaagt

SEQ ID NO: 813 - RNA, 21 nt, synthetic construct
  source 1..21: mol_type = other RNA
  modified_base 1: mod_base = OTHER; note = 2'-O-methyladenosine-3'-phosphorothioate
  modified_base 2: mod_base = OTHER; note = 2'-O-methylcytidine-3'-phosphorothioate
  modified_base 3: mod_base = OTHER; note = 2'-O-methyluridine-3'-phosphate
  modified_base 4: mod_base = OTHER; note = 2'-O-methyladenosine-3'-phosphate
  modified_base 5: mod_base = OTHER; note = 2'-O-methyladenosine-3'-phosphate
  modified_base 6: mod_base = OTHER; note = 2'-O-methyladenosine-3'-phosphate
  modified_base 7: mod_base = OTHER; note = 2'-deoxy-2'-fluoroadenosine-3'-phosphate
  modified_base 8: mod_base = OTHER; note = 2'-O-methyluridine-3'-phosphate
  modified_base 9: mod_base = OTHER; note = 2'-deoxy-2'-fluoroadenosine-3'-phosphate
  modified_base 10: mod_base = OTHER; note = 2'-deoxy-2'-fluoroadenosine-3'-phosphate
  modified_base 11: mod_base = OTHER; note = 2'-deoxy-2'-fluorouridine-3'-phosphate
  modified_base 12: mod_base = OTHER; note = 2'-O-methylguanosine-3'-phosphate
  modified_base 13: mod_base = OTHER; note = 2'-O-methyluridine-3'-phosphate
  modified_base 14: mod_base = OTHER; note = 2'-O-methyluridine-3'-phosphate
  modified_base 15: mod_base = OTHER; note = 2'-O-methyluridine-3'-phosphate
  modified_base 16: mod_base = OTHER; note = 2'-O-methyladenosine-3'-phosphate
  modified_base 17: mod_base = OTHER; note = 2'-O-methyladenosine-3'-phosphate
  modified_base 18: mod_base = OTHER; note = 2'-O-methyladenosine-3'-phosphate
  modified_base 19: mod_base = OTHER; note = 2'-O-methylguanosine-3'-phosphate
  modified_base 20: mod_base = OTHER; note = 2'-O-methyladenosine-3'-phosphate
  modified_base 21: mod_base = OTHER; note = 2'-O-methyluridine-3'-phosphate ((2S,4R)-1-[29-[[2-(acetylamino)-2-deoxy-beta-D-galactopyra nosyl]oxy]-14,14-bis[[3-[[3-[[5-[[2-(acetylamino)-2-deoxy-b eta-D-galactopyranosyl]oxy]-1-oxopentyl]amino]propyl]amino] -3-oxopropoxy]methyl]-1,12,19,25-tetraoxo-16-oxa-13,20,24-t riazanonacos-1-yl]-4-hydroxy-2-pyrrolidinyl)methyl ester
actaaaataatgtttaaagat

SEQ ID NO: 814 - RNA, 21 nt, synthetic construct
  source 1..21: mol_type = other RNA
  modified_base 1: mod_base = OTHER; note = 2'-O-methyladenosine-3'-phosphorothioate
  modified_base 2: mod_base = OTHER; note = 2'-O-methylcytidine-3'-phosphorothioate
  modified_base 3: mod_base = OTHER; note = 2'-O-methylcytidine-3'-phosphate
  modified_base 4: mod_base = OTHER; note = 2'-O-methyluridine-3'-phosphate
  modified_base 5: mod_base = OTHER; note = 2'-O-methylguanosine-3'-phosphate
  modified_base 6: mod_base = OTHER; note = 2'-O-methyluridine-3'-phosphate
  modified_base 7: mod_base = OTHER; note = 2'-deoxy-2'-fluorouridine-3'-phosphate
  modified_base 8: mod_base = OTHER; note = 2'-O-methylguanosine-3'-phosphate
  modified_base 9: mod_base = OTHER; note = 2'-deoxy-2'-fluoroadenosine-3'-phosphate
  modified_base 10: mod_base = OTHER; note = 2'-deoxy-2'-fluoroadenosine-3'-phosphate
  modified_base 11: mod_base = OTHER; note = 2'-deoxy-2'-fluorouridine-3'-phosphate
  modified_base 12: mod_base = OTHER; note = 2'-O-methyluridine-3'-phosphate
  modified_base 13: mod_base = OTHER; note = 2'-O-methyluridine-3'-phosphate
  modified_base 14: mod_base = OTHER; note = 2'-O-methyluridine-3'-phosphate
  modified_base 15: mod_base = OTHER; note = 2'-O-methylguanosine-3'-phosphate
  modified_base 16: mod_base = OTHER; note = 2'-O-methyluridine-3'-phosphate
  modified_base 17: mod_base = OTHER; note = 2'-O-methyladenosine-3'-phosphate
  modified_base 18: mod_base = OTHER; note = 2'-O-methyluridine-3'-phosphate
  modified_base 19: mod_base = OTHER; note = 2'-O-methyluridine-3'-phosphate
  modified_base 20: mod_base = OTHER; note = 2'-O-methyladenosine-3'-phosphate
  modified_base 21: mod_base = OTHER; note = 2'-O-methyluridine-3'-phosphate ((2S,4R)-1-[29-[[2-(acetylamino)-2-deoxy-beta-D-galactopyra nosyl]oxy]-14,14-bis[[3-[[3-[[5-[[2-(acetylamino)-2-deoxy-b eta-D-galactopyranosyl]oxy]-1-oxopentyl]amino]propyl]amino] -3-oxopropoxy]methyl]-1,12,19,25-tetraoxo-16-oxa-13,20,24-t riazanonacos-1-yl]-4-hydroxy-2-pyrrolidinyl)methyl ester
acctgttgaattttgtattat

SEQ ID NO: 815 - RNA, 21 nt, synthetic construct
  source 1..21: mol_type = other RNA
  modified_base 1: mod_base = OTHER; note = 2'-O-methylcytidine-3'-phosphorothioate
  modified_base 2: mod_base = OTHER; note = 2'-O-methylcytidine-3'-phosphorothioate
  modified_base 3: mod_base = OTHER; note = 2'-O-methyluridine-3'-phosphate
  modified_base 4: mod_base = OTHER; note = 2'-O-methylguanosine-3'-phosphate
  modified_base 5: mod_base = OTHER; note = 2'-O-methyluridine-3'-phosphate
  modified_base 6: mod_base = OTHER; note = 2'-O-methyluridine-3'-phosphate
  modified_base 7: mod_base = OTHER; note = 2'-deoxy-2'-fluoroguanosine-3'-phosphate
  modified_base 8: mod_base = OTHER; note = 2'-O-methyladenosine-3'-phosphate
  modified_base 9: mod_base = OTHER; note = 2'-deoxy-2'-fluoroadenosine-3'-phosphate
  modified_base 10: mod_base = OTHER; note = 2'-deoxy-2'-fluorouridine-3'-phosphate
  modified_base 11: mod_base = OTHER; note = 2'-deoxy-2'-fluorouridine-3'-phosphate
  modified_base 12: mod_base = OTHER; note = 2'-O-methyluridine-3'-phosphate
  modified_base 13: mod_base = OTHER; note = 2'-O-methyluridine-3'-phosphate
  modified_base 14: mod_base = OTHER; note = 2'-O-methylguanosine-3'-phosphate
  modified_base 15: mod_base = OTHER; note = 2'-O-methyluridine-3'-phosphate
  modified_base 16: mod_base = OTHER; note = 2'-O-methyladenosine-3'-phosphate
  modified_base 17: mod_base = OTHER; note = 2'-O-methyluridine-3'-phosphate
  modified_base 18: mod_base = OTHER; note = 2'-O-methyluridine-3'-phosphate
  modified_base 19: mod_base = OTHER; note = 2'-O-methyladenosine-3'-phosphate
  modified_base 20: mod_base = OTHER; note = 2'-O-methyluridine-3'-phosphate
  modified_base 21: mod_base = OTHER; note = 2'-O-methyluridine-3'-phosphate ((2S,4R)-1-[29-[[2-(acetylamino)-2-deoxy-beta-D-galactopyra nosyl]oxy]-14,14-bis[[3-[[3-[[5-[[2-(acetylamino)-2-deoxy-b eta-D-galactopyranosyl]oxy]-1-oxopentyl]amino]propyl]amino] -3-oxopropoxy]methyl]-1,12,19,25-tetraoxo-16-oxa-13,20,24-t riazanonacos-1-yl]-4-hydroxy-2-pyrrolidinyl)methyl ester
cctgttgaattttgtattatt

SEQ ID NO: 816 - RNA, 21 nt, synthetic construct
  source 1..21: mol_type = other RNA
  modified_base 1: mod_base = OTHER; note = 2'-O-methyluridine-3'-phosphorothioate
  modified_base 2: mod_base = OTHER; note = 2'-O-methylguanosine-3'-phosphorothioate
  modified_base 3: mod_base = OTHER; note = 2'-O-methylcytidine-3'-phosphate
  modified_base 4: mod_base = OTHER; note = 2'-O-methylguanosine-3'-phosphate
  modified_base 5: mod_base = OTHER; note = 2'-O-methylguanosine-3'-phosphate
  modified_base 6: mod_base = OTHER; note = 2'-O-methylcytidine-3'-phosphate
  modified_base 7: mod_base = OTHER; note = 2'-deoxy-2'-fluorouridine-3'-phosphate
  modified_base 8: mod_base = OTHER; note = 2'-O-methyluridine-3'-phosphate
  modified_base 9: mod_base = OTHER; note = 2'-deoxy-2'-fluorocytidine-3'-phosphate
  modified_base 10: mod_base = OTHER; note = 2'-deoxy-2'-fluorocytidine-3'-phosphate
  modified_base 11: mod_base = OTHER; note = 2'-deoxy-2'-fluorouridine-3'-phosphate
  modified_base 12: mod_base = OTHER; note = 2'-O-methylguanosine-3'-phosphate
  modified_base 13: mod_base = OTHER; note = 2'-O-methylguanosine-3'-phosphate
  modified_base 14: mod_base = OTHER; note = 2'-O-methylguanosine-3'-phosphate
  modified_base 15: mod_base = OTHER; note = 2'-O-methylcytidine-3'-phosphate
  modified_base 16: mod_base = OTHER; note = 2'-O-methyluridine-3'-phosphate
  modified_base 17: mod_base = OTHER; note = 2'-O-methyluridine-3'-phosphate
  modified_base 18: mod_base = OTHER; note = 2'-O-methylcytidine-3'-phosphate
  modified_base 19: mod_base = OTHER; note = 2'-O-methyluridine-3'-phosphate
  modified_base 20: mod_base = OTHER; note = 2'-O-methyladenosine-3'-phosphate
  modified_base 21: mod_base = OTHER; note = 2'-O-methyluridine-3'-phosphate ((2S,4R)-1-[29-[[2-(acetylamino)-2-deoxy-beta-D-galactopyra nosyl]oxy]-14,14-bis[[3-[[3-[[5-[[2-(acetylamino)-2-deoxy-b eta-D-galactopyranosyl]oxy]-1-oxopentyl]amino]propyl]amino] -3-oxopropoxy]methyl]-1,12,19,25-tetraoxo-16-oxa-13,20,24-t riazanonacos-1-yl]-4-hydroxy-2-pyrrolidinyl)methyl ester
tgcggcttcctgggcttctat

SEQ ID NO: 817 - RNA, 21 nt, synthetic construct
  source 1..21: mol_type = other RNA
  modified_base 1: mod_base = OTHER; note = 2'-O-methyluridine-3'-phosphorothioate
  modified_base 2: mod_base = OTHER; note = 2'-O-methyluridine-3'-phosphorothioate
  modified_base 3: mod_base = OTHER; note = 2'-O-methylcytidine-3'-phosphate
  modified_base 4: mod_base = OTHER; note = 2'-O-methylcytidine-3'-phosphate
  modified_base 5: mod_base = OTHER; note = 2'-O-methyluridine-3'-phosphate
  modified_base 6: mod_base = OTHER; note = 2'-O-methylguanosine-3'-phosphate
  modified_base 7: mod_base = OTHER; note = 2'-deoxy-2'-fluoroguanosine-3'-phosphate
  modified_base 8: mod_base = OTHER; note = 2'-O-methylguanosine-3'-phosphate
  modified_base 9: mod_base = OTHER; note = 2'-deoxy-2'-fluorocytidine-3'-phosphate
  modified_base 10: mod_base = OTHER; note = 2'-deoxy-2'-fluorouridine-3'-phosphate
  modified_base 11: mod_base = OTHER; note = 2'-deoxy-2'-fluorouridine-3'-phosphate
  modified_base 12: mod_base = OTHER; note = 2'-O-methylcytidine-3'-phosphate
  modified_base 13: mod_base = OTHER; note = 2'-O-methyluridine-3'-phosphate
  modified_base 14: mod_base = OTHER; note = 2'-O-methyladenosine-3'-phosphate
  modified_base 15: mod_base = OTHER; note = 2'-O-methylcytidine-3'-phosphate
  modified_base 16: mod_base = OTHER; note = 2'-O-methylcytidine-3'-phosphate
  modified_base 17: mod_base = OTHER; note = 2'-O-methyladenosine-3'-phosphate
  modified_base 18: mod_base = OTHER; note = 2'-O-methylcytidine-3'-phosphate
  modified_base 19: mod_base = OTHER; note = 2'-O-methylguanosine-3'-phosphate
  modified_base 20: mod_base = OTHER; note = 2'-O-methyluridine-3'-phosphate
  modified_base 21: mod_base = OTHER; note = 2'-O-methyluridine-3'-phosphate ((2S,4R)-1-[29-[[2-(acetylamino)-2-deoxy-beta-D-galactopyra nosyl]oxy]-14,14-bis[[3-[[3-[[5-[[2-(acetylamino)-2-deoxy-b eta-D-galactopyranosyl]oxy]-1-oxopentyl]amino]propyl]amino] -3-oxopropoxy]methyl]-1,12,19,25-tetraoxo-16-oxa-13,20,24-t riazanonacos-1-yl]-4-hydroxy-2-pyrrolidinyl)methyl ester
ttcctgggcttctaccacgtt

SEQ ID NO: 818 - RNA, 21 nt, synthetic construct
  source 1..21: mol_type = other RNA
  modified_base 1: mod_base = OTHER; note = 2'-O-methylcytidine-3'-phosphorothioate
  modified_base 2: mod_base = OTHER; note = 2'-O-methylcytidine-3'-phosphorothioate
  modified_base 3: mod_base = OTHER; note = 2'-O-methylcytidine-3'-phosphate
  modified_base 4: mod_base = OTHER; note = 2'-O-methylguanosine-3'-phosphate
  modified_base 5: mod_base = OTHER; note = 2'-O-methylcytidine-3'-phosphate
  modified_base 6: mod_base = OTHER; note = 2'-O-methyluridine-3'-phosphate
  modified_base 7: mod_base = OTHER; note = 2'-deoxy-2'-fluoroguanosine-3'-phosphate
  modified_base 8: mod_base = OTHER; note = 2'-O-methylguanosine-3'-phosphate
  modified_base 9: mod_base = OTHER; note = 2'-deoxy-2'-fluoroadenosine-3'-phosphate
  modified_base 10: mod_base = OTHER; note = 2'-deoxy-2'-fluoroguanosine-3'-phosphate
  modified_base 11: mod_base = OTHER; note = 2'-deoxy-2'-fluorocytidine-3'-phosphate
  modified_base 12: mod_base = OTHER; note = 2'-O-methyladenosine-3'-phosphate
  modified_base 13: mod_base = OTHER; note = 2'-O-methylguanosine-3'-phosphate
  modified_base 14: mod_base = OTHER; note = 2'-O-methyladenosine-3'-phosphate
  modified_base 15: mod_base = OTHER; note = 2'-O-methylcytidine-3'-phosphate
  modified_base 16: mod_base = OTHER; note = 2'-O-methyluridine-3'-phosphate
  modified_base 17: mod_base = OTHER; note = 2'-O-methylcytidine-3'-phosphate
  modified_base 18: mod_base = OTHER; note = 2'-O-methyluridine-3'-phosphate
  modified_base 19: mod_base = OTHER; note = 2'-O-methylguanosine-3'-phosphate
  modified_base 20: mod_base = OTHER; note = 2'-O-methylcytidine-3'-phosphate
  modified_base 21: mod_base = OTHER; note = 2'-O-methyluridine-3'-phosphate ((2S,4R)-1-[29-[[2-(acetylamino)-2-deoxy-beta-D-galactopyra nosyl]oxy]-14,14-bis[[3-[[3-[[5-[[2-(acetylamino)-2-deoxy-b eta-D-galactopyranosyl]oxy]-1-oxopentyl]amino]propyl]amino] -3-oxopropoxy]methyl]-1,12,19,25-tetraoxo-16-oxa-13,20,24-t riazanonacos-1-yl]-4-hydroxy-2-pyrrolidinyl)methyl ester
cccgctggagcagactctgct

SEQ ID NO: 819 - RNA, 21 nt, synthetic construct
  source 1..21: mol_type = other RNA
  modified_base 1: mod_base = OTHER; note = 2'-O-methylcytidine-3'-phosphorothioate
  modified_base 2: mod_base = OTHER; note = 2'-O-methyladenosine-3'-phosphorothioate
  modified_base 3: mod_base = OTHER; note = 2'-O-methylguanosine-3'-phosphate
  modified_base 4: mod_base = OTHER; note = 2'-O-methyladenosine-3'-phosphate
  modified_base 5: mod_base = OTHER; note = 2'-O-methylcytidine-3'-phosphate
  modified_base 6: mod_base = OTHER; note = 2'-O-methyluridine-3'-phosphate
  modified_base 7: mod_base = OTHER; note = 2'-deoxy-2'-fluorocytidine-3'-phosphate
  modified_base 8: mod_base = OTHER; note = 2'-O-methyluridine-3'-phosphate
  modified_base 9: mod_base = OTHER; note = 2'-deoxy-2'-fluoroguanosine-3'-phosphate
  modified_base 10: mod_base = OTHER; note = 2'-deoxy-2'-fluorocytidine-3'-phosphate
  modified_base 11: mod_base = OTHER; note = 2'-deoxy-2'-fluoroadenosine-3'-phosphate
  modified_base 12: mod_base = OTHER; note = 2'-O-methylguanosine-3'-phosphate
  modified_base 13: mod_base = OTHER; note = 2'-O-methylguanosine-3'-phosphate
  modified_base 14: mod_base = OTHER; note = 2'-O-methyluridine-3'-phosphate
  modified_base 15: mod_base = OTHER; note = 2'-O-methylcytidine-3'-phosphate
  modified_base 16: mod_base = OTHER; note = 2'-O-methylcytidine-3'-phosphate
  modified_base 17: mod_base = OTHER; note = 2'-O-methyluridine-3'-phosphate
  modified_base 18: mod_base = OTHER; note = 2'-O-methylcytidine-3'-phosphate
  modified_base 19: mod_base = OTHER; note = 2'-O-methyluridine-3'-phosphate
  modified_base 20: mod_base = OTHER; note = 2'-O-methylcytidine-3'-phosphate
  modified_base 21: mod_base = OTHER; note = 2'-O-methyluridine-3'-phosphate ((2S,4R)-1-[29-[[2-(acetylamino)-2-deoxy-beta-D-galactopyra nosyl]oxy]-14,14-bis[[3-[[3-[[5-[[2-(acetylamino)-2-deoxy-b eta-D-galactopyranosyl]oxy]-1-oxopentyl]amino]propyl]amino] -3-oxopropoxy]methyl]-1,12,19,25-tetraoxo-16-oxa-13,20,24-t riazanonacos-1-yl]-4-hydroxy-2-pyrrolidinyl)methyl ester
cagactctgcaggtcctctct

SEQ ID NO: 820 - RNA, 21 nt, synthetic construct
  source 1..21: mol_type = other RNA
  modified_base 1: mod_base = OTHER; note = 2'-O-methyladenosine-3'-phosphorothioate
  modified_base 2: mod_base = OTHER; note = 2'-O-methylcytidine-3'-phosphorothioate
  modified_base 3: mod_base = OTHER; note = 2'-O-methyluridine-3'-phosphate
  modified_base 4: mod_base = OTHER; note = 2'-O-methylcytidine-3'-phosphate
  modified_base 5: mod_base = OTHER; note = 2'-O-methyluridine-3'-phosphate
  modified_base 6: mod_base = OTHER; note = 2'-O-methylguanosine-3'-phosphate
  modified_base 7: mod_base = OTHER; note = 2'-deoxy-2'-fluorocytidine-3'-phosphate
  modified_base 8: mod_base = OTHER; note = 2'-O-methyladenosine-3'-phosphate
  modified_base 9: mod_base = OTHER; note = 2'-deoxy-2'-fluoroguanosine-3'-phosphate
  modified_base 10: mod_base = OTHER; note = 2'-deoxy-2'-fluoroguanosine-3'-phosphate
  modified_base 11: mod_base = OTHER; note = 2'-deoxy-2'-fluorouridine-3'-phosphate
  modified_base 12: mod_base = OTHER; note = 2'-O-methylcytidine-3'-phosphate
  modified_base 13: mod_base = OTHER; note = 2'-O-methylcytidine-3'-phosphate
  modified_base 14: mod_base = OTHER; note = 2'-O-methyluridine-3'-phosphate
  modified_base 15: mod_base = OTHER; note = 2'-O-methylcytidine-3'-phosphate
  modified_base 16: mod_base = OTHER; note = 2'-O-methyluridine-3'-phosphate
  modified_base 17: mod_base = OTHER; note = 2'-O-methylcytidine-3'-phosphate
  modified_base 18: mod_base = OTHER; note = 2'-O-methyladenosine-3'-phosphate
  modified_base 19: mod_base = OTHER; note = 2'-O-methylguanosine-3'-phosphate
  modified_base 20: mod_base = OTHER; note = 2'-O-methyladenosine-3'-phosphate
  modified_base 21: mod_base = OTHER; note = 2'-O-methyluridine-3'-phosphate ((2S,4R)-1-[29-[[2-(acetylamino)-2-deoxy-beta-D-galactopyra nosyl]oxy]-14,14-bis[[3-[[3-[[5-[[2-(acetylamino)-2-deoxy-b eta-D-galactopyranosyl]oxy]-1-oxopentyl]amino]propyl]amino] -3-oxopropoxy]methyl]-1,12,19,25-tetraoxo-16-oxa-13,20,24-t riazanonacos-1-yl]-4-hydroxy-2-pyrrolidinyl)methyl ester
actctgcaggtcctctcagat

SEQ ID NO: 821 - RNA, 21 nt, synthetic construct
  source 1..21: mol_type = other RNA
  modified_base 1: mod_base = OTHER; note = 2'-O-methyluridine-3'-phosphorothioate
  modified_base 2: mod_base = OTHER; note = 2'-O-methylcytidine-3'-phosphorothioate
  modified_base 3: mod_base = OTHER; note = 2'-O-methyluridine-3'-phosphate
  modified_base 4: mod_base = OTHER; note = 2'-O-methylguanosine-3'-phosphate
  modified_base 5: mod_base = OTHER; note = 2'-O-methylcytidine-3'-phosphate
  modified_base 6: mod_base = OTHER; note = 2'-O-methyladenosine-3'-phosphate
  modified_base 7: mod_base = OTHER; note = 2'-deoxy-2'-fluoroguanosine-3'-phosphate
  modified_base 8: mod_base = OTHER; note = 2'-O-methylguanosine-3'-phosphate
  modified_base 9: mod_base = OTHER; note = 2'-deoxy-2'-fluorouridine-3'-phosphate
  modified_base 10: mod_base = OTHER; note = 2'-deoxy-2'-fluorocytidine-3'-phosphate
  modified_base 11: mod_base = OTHER; note = 2'-deoxy-2'-fluorocytidine-3'-phosphate
  modified_base 12: mod_base = OTHER; note = 2'-O-methyluridine-3'-phosphate
  modified_base 13: mod_base = OTHER; note = 2'-O-methylcytidine-3'-phosphate
  modified_base 14: mod_base = OTHER; note = 2'-O-methyluridine-3'-phosphate
  modified_base 15: mod_base = OTHER; note = 2'-O-methylcytidine-3'-phosphate
  modified_base 16: mod_base = OTHER; note = 2'-O-methyladenosine-3'-phosphate
  modified_base 17: mod_base = OTHER; note = 2'-O-methylguanosine-3'-phosphate
  modified_base 18: mod_base = OTHER; note = 2'-O-methyladenosine-3'-phosphate
  modified_base 19: mod_base = OTHER; note = 2'-O-methyluridine-3'-phosphate
  modified_base 20: mod_base = OTHER; note = 2'-O-methylcytidine-3'-phosphate
  modified_base 21: mod_base = OTHER; note = 2'-O-methyluridine-3'-phosphate ((2S,4R)-1-[29-[[2-(acetylamino)-2-deoxy-beta-D-galactopyra nosyl]oxy]-14,14-bis[[3-[[3-[[5-[[2-(acetylamino)-2-deoxy-b eta-D-galactopyranosyl]oxy]-1-oxopentyl]amino]propyl]amino] -3-oxopropoxy]methyl]-1,12,19,25-tetraoxo-16-oxa-13,20,24-t riazanonacos-1-yl]-4-hydroxy-2-pyrrolidinyl)methyl ester
tctgcaggtcctctcagatct

SEQ ID NO: 822 - RNA, 21 nt, synthetic construct
  source 1..21: mol_type = other RNA
  modified_base 1: mod_base = OTHER; note = 2'-O-methylcytidine-3'-phosphorothioate
  modified_base 2: mod_base = OTHER; note = 2'-O-methyladenosine-3'-phosphorothioate
  modified_base 3: mod_base = OTHER; note = 2'-O-methyluridine-3'-phosphate
  modified_base 4: mod_base = OTHER; note = 2'-O-methylcytidine-3'-phosphate
  modified_base 5: mod_base = OTHER; note = 2'-O-methyluridine-3'-phosphate
  modified_base 6: mod_base = OTHER; note = 2'-O-methyluridine-3'-phosphate
  modified_base 7: mod_base = OTHER; note = 2'-deoxy-2'-fluorocytidine-3'-phosphate
  modified_base 8: mod_base = OTHER; note = 2'-O-methylcytidine-3'-phosphate
  modified_base 9: mod_base = OTHER; note = 2'-deoxy-2'-fluoroadenosine-3'-phosphate
  modified_base 10: mod_base = OTHER; note = 2'-deoxy-2'-fluorouridine-3'-phosphate
  modified_base 11: mod_base = OTHER; note = 2'-deoxy-2'-fluorocytidine-3'-phosphate
  modified_base 12: mod_base = OTHER; note = 2'-O-methylcytidine-3'-phosphate
  modified_base 13: mod_base = OTHER; note = 2'-O-methyladenosine-3'-phosphate
  modified_base 14: mod_base = OTHER; note = 2'-O-methyluridine-3'-phosphate
  modified_base 15: mod_base = OTHER; note = 2'-O-methylcytidine-3'-phosphate
  modified_base 16: mod_base = OTHER; note = 2'-O-methylcytidine-3'-phosphate
  modified_base 17: mod_base = OTHER; note = 2'-O-methyluridine-3'-phosphate
  modified_base 18: mod_base = OTHER; note = 2'-O-methyluridine-3'-phosphate
  modified_base 19: mod_base = OTHER; note = 2'-O-methylcytidine-3'-phosphate
  modified_base 20: mod_base = OTHER; note = 2'-O-methyladenosine-3'-phosphate
  modified_base 21: mod_base = OTHER; note = 2'-O-methyluridine-3'-phosphate ((2S,4R)-1-[29-[[2-(acetylamino)-2-deoxy-beta-D-galactopyra nosyl]oxy]-14,14-bis[[3-[[3-[[5-[[2-(acetylamino)-2-deoxy-b eta-D-galactopyranosyl]oxy]-1-oxopentyl]amino]propyl]amino] -3-oxopropoxy]methyl]-1,12,19,25-tetraoxo-16-oxa-13,20,24-t riazanonacos-1-yl]-4-hydroxy-2-pyrrolidinyl)methyl ester
catcttccatccatccttcat

SEQ ID NO: 823 - RNA, 21 nt, synthetic construct
  source 1..21: mol_type = other RNA
  modified_base 1: mod_base = OTHER; note = 2'-O-methyluridine-3'-phosphorothioate
  modified_base 2: mod_base = OTHER; note = 2'-O-methyladenosine-3'-phosphorothioate
  modified_base 3: mod_base = OTHER; note = 2'-O-methylcytidine-3'-phosphate
  modified_base 4: mod_base = OTHER; note = 2'-O-methyladenosine-3'-phosphate
  modified_base 5: mod_base = OTHER; note = 2'-O-methylguanosine-3'-phosphate
  modified_base 6: mod_base = OTHER; note = 2'-O-methyluridine-3'-phosphate
  modified_base 7: mod_base = OTHER; note = 2'-deoxy-2'-fluoroguanosine-3'-phosphate
  modified_base 8: mod_base = OTHER; note = 2'-O-methylguanosine-3'-phosphate
  modified_base 9: mod_base = OTHER; note = 2'-deoxy-2'-fluorocytidine-3'-phosphate
  modified_base 10: mod_base = OTHER; note = 2'-deoxy-2'-fluorocytidine-3'-phosphate
  modified_base 11: mod_base = OTHER; note = 2'-deoxy-2'-fluorouridine-3'-phosphate
  modified_base 12: mod_base = OTHER; note = 2'-O-methyluridine-3'-phosphate
  modified_base 13: mod_base = OTHER; note = 2'-O-methyladenosine-3'-phosphate
  modified_base 14: mod_base = OTHER; note = 2'-O-methyluridine-3'-phosphate
  modified_base 15: mod_base = OTHER; note = 2'-O-methylcytidine-3'-phosphate
  modified_base 16: mod_base = OTHER; note = 2'-O-methylcytidine-3'-phosphate
  modified_base 17: mod_base = OTHER; note = 2'-O-methylcytidine-3'-phosphate
  modified_base 18: mod_base = OTHER; note = 2'-O-methyluridine-3'-phosphate
  modified_base 19: mod_base = OTHER; note = 2'-O-methylcytidine-3'-phosphate
  modified_base 20: mod_base = OTHER; note = 2'-O-methylcytidine-3'-phosphate
  modified_base 21: mod_base = OTHER; note = 2'-O-methyluridine-3'-phosphate ((2S,4R)-1-[29-[[2-(acetylamino)-2-deoxy-beta-D-galactopyra nosyl]oxy]-14,14-bis[[3-[[3-[[5-[[2-(acetylamino)-2-deoxy-b eta-D-galactopyranosyl]oxy]-1-oxopentyl]amino]propyl]amino] -3-oxopropoxy]methyl]-1,12,19,25-tetraoxo-16-oxa-13,20,24-t riazanonacos-1-yl]-4-hydroxy-2-pyrrolidinyl)methyl ester
tacagtggccttatccctcct

SEQ ID NO: 824 - RNA, 21 nt, synthetic construct
  source 1..21: mol_type = other RNA
  modified_base 1: mod_base = OTHER; note = 2'-O-methylcytidine-3'-phosphorothioate
  modified_base 2: mod_base = OTHER; note = 2'-O-methyladenosine-3'-phosphorothioate
  modified_base 3: mod_base = OTHER; note = 2'-O-methylguanosine-3'-phosphate
  modified_base 4: mod_base = OTHER; note = 2'-O-methyluridine-3'-phosphate
  modified_base 5: mod_base = OTHER; note = 2'-O-methylguanosine-3'-phosphate
  modified_base 6: mod_base = OTHER; note = 2'-O-methylguanosine-3'-phosphate
  modified_base 7: mod_base = OTHER; note = 2'-deoxy-2'-fluorocytidine-3'-phosphate
  modified_base 8: mod_base = OTHER; note = 2'-O-methylcytidine-3'-phosphate
  modified_base 9: mod_base = OTHER; note = 2'-deoxy-2'-fluorouridine-3'-phosphate
  modified_base 10: mod_base = OTHER; note = 2'-deoxy-2'-fluorouridine-3'-phosphate
  modified_base 11: mod_base = OTHER; note = 2'-deoxy-2'-fluoroadenosine-3'-phosphate
  modified_base 12: mod_base = OTHER; note = 2'-O-methyluridine-3'-phosphate
  modified_base 13: mod_base = OTHER; note = 2'-O-methylcytidine-3'-phosphate
  modified_base 14: mod_base = OTHER; note = 2'-O-methylcytidine-3'-phosphate
  modified_base 15: mod_base = OTHER; note = 2'-O-methylcytidine-3'-phosphate
  modified_base 16: mod_base = OTHER; note = 2'-O-methyluridine-3'-phosphate
  modified_base 17: mod_base = OTHER; note = 2'-O-methylcytidine-3'-phosphate
  modified_base 18: mod_base = OTHER; note = 2'-O-methylcytidine-3'-phosphate
  modified_base 19: mod_base = OTHER; note = 2'-O-methyluridine-3'-phosphate
  modified_base 20: mod_base = OTHER; note = 2'-O-methyluridine-3'-phosphate
  modified_base 21: mod_base = OTHER; note = 2'-O-methyluridine-3'-phosphate ((2S,4R)-1-[29-[[2-(acetylamino)-2-deoxy-beta-D-galactopyra nosyl]oxy]-14,14-bis[[3-[[3-[[5-[[2-(acetylamino)-2-deoxy-b eta-D-galactopyranosyl]oxy]-1-oxopentyl]amino]propyl]amino] -3-oxopropoxy]methyl]-1,12,19,25-tetraoxo-16-oxa-13,20,24-t riazanonacos-1-yl]-4-hydroxy-2-pyrrolidinyl)methyl ester
cagtggccttatccctccttt

SEQ ID NO: 825 - RNA, 21 nt, synthetic construct
  source 1..21: mol_type = other RNA
  modified_base 1: mod_base = OTHER; note = 2'-O-methylguanosine-3'-phosphorothioate
  modified_base 2: mod_base = OTHER; note = 2'-O-methyluridine-3'-phosphorothioate
  modified_base 3: mod_base = OTHER; note = 2'-O-methylguanosine-3'-phosphate
  modified_base 4: mod_base = OTHER; note = 2'-O-methylguanosine-3'-phosphate
  modified_base 5: mod_base = OTHER; note = 2'-O-methylcytidine-3'-phosphate
  modified_base 6: mod_base = OTHER; note = 2'-O-methylcytidine-3'-phosphate
  modified_base 7: mod_base = OTHER; note = 2'-deoxy-2'-fluorouridine-3'-phosphate
  modified_base 8: mod_base = OTHER; note = 2'-O-methyluridine-3'-phosphate
  modified_base 9: mod_base = OTHER; note = 2'-deoxy-2'-fluoroadenosine-3'-phosphate
  modified_base 10: mod_base = OTHER; note = 2'-deoxy-2'-fluorouridine-3'-phosphate
  modified_base 11: mod_base = OTHER; note = 2'-deoxy-2'-fluorocytidine-3'-phosphate
  modified_base 12: mod_base = OTHER; note = 2'-O-methylcytidine-3'-phosphate
  modified_base 13: mod_base = OTHER; note = 2'-O-methylcytidine-3'-phosphate
  modified_base 14: mod_base = OTHER; note = 2'-O-methyluridine-3'-phosphate
  modified_base 15: mod_base = OTHER; note = 2'-O-methylcytidine-3'-phosphate
  modified_base 16: mod_base = OTHER; note = 2'-O-methylcytidine-3'-phosphate
  modified_base 17: mod_base = OTHER; note = 2'-O-methyluridine-3'-phosphate
  modified_base 18: mod_base = OTHER; note = 2'-O-methyluridine-3'-phosphate
  modified_base 19: mod_base = OTHER; note = 2'-O-methylcytidine-3'-phosphate
  modified_base 20: mod_base = OTHER; note = 2'-O-methylcytidine-3'-phosphate
  modified_base 21: mod_base = OTHER; note = 2'-O-methyluridine-3'-phosphate ((2S,4R)-1-[29-[[2-(acetylamino)-2-deoxy-beta-D-galactopyra nosyl]oxy]-14,14-bis[[3-[[3-[[5-[[2-(acetylamino)-2-deoxy-b eta-D-galactopyranosyl]oxy]-1-oxopentyl]amino]propyl]amino] -3-oxopropoxy]methyl]-1,12,19,25-tetraoxo-16-oxa-13,20,24-t riazanonacos-1-yl]-4-hydroxy-2-pyrrolidinyl)methyl ester
gtggccttatccctccttcct

SEQ ID NO: 826 - RNA, 21 nt, synthetic construct
  source 1..21: mol_type = other RNA
  modified_base 1: mod_base = OTHER; note = 2'-O-methyluridine-3'-phosphorothioate
  modified_base 2: mod_base = OTHER; note = 2'-O-methylguanosine-3'-phosphorothioate
  modified_base 3: mod_base = OTHER; note = 2'-O-methyladenosine-3'-phosphate
  modified_base 4: mod_base = OTHER; note = 2'-O-methylguanosine-3'-phosphate
  modified_base 5: mod_base = OTHER; note = 2'-O-methyluridine-3'-phosphate
  modified_base 6: mod_base = OTHER; note = 2'-O-methylguanosine-3'-phosphate
  modified_base 7: mod_base = OTHER; note = 2'-deoxy-2'-fluoroadenosine-3'-phosphate
  modified_base 8: mod_base = OTHER; note = 2'-O-methylcytidine-3'-phosphate
  modified_base 9: mod_base = OTHER; note = 2'-deoxy-2'-fluoroadenosine-3'-phosphate
  modified_base 10: mod_base = OTHER; note = 2'-deoxy-2'-fluoroadenosine-3'-phosphate
  modified_base 11: mod_base = OTHER; note = 2'-deoxy-2'-fluorocytidine-3'-phosphate
  modified_base 12: mod_base = OTHER; note = 2'-O-methylguanosine-3'-phosphate
  modified_base 13: mod_base = OTHER; note = 2'-O-methyluridine-3'-phosphate
  modified_base 14: mod_base = OTHER; note = 2'-O-methyladenosine-3'-phosphate
  modified_base 15: mod_base = OTHER; note = 2'-O-methylcytidine-3'-phosphate
  modified_base 16: mod_base = OTHER; note = 2'-O-methylcytidine-3'-phosphate
  modified_base 17: mod_base = OTHER; note = 2'-O-methylcytidine-3'-phosphate
  modified_base 18: mod_base = OTHER; note = 2'-O-methyluridine-3'-phosphate
  modified_base 19: mod_base = OTHER; note = 2'-O-methyluridine-3'-phosphate
  modified_base 20: mod_base = OTHER; note = 2'-O-methylcytidine-3'-phosphate
  modified_base 21: mod_base = OTHER; note = 2'-O-methyluridine-3'-phosphate ((2S,4R)-1-[29-[[2-(acetylamino)-2-deoxy-beta-D-galactopyra nosyl]oxy]-14,14-bis[[3-[[3-[[5-[[2-(acetylamino)-2-deoxy-b eta-D-galactopyranosyl]oxy]-1-oxopentyl]amino]propyl]amino] -3-oxopropoxy]methyl]-1,12,19,25-tetraoxo-16-oxa-13,20,24-t riazanonacos-1-yl]-4-hydroxy-2-pyrrolidinyl)methyl ester
tgagtgacaacgtacccttct

SEQ ID NO: 827 - RNA, 21 nt, synthetic construct
  source 1..21: mol_type = other RNA
  modified_base 1: mod_base = OTHER; note = 2'-O-methylguanosine-3'-phosphorothioate
  modified_base 2: mod_base = OTHER; note = 2'-O-methyladenosine-3'-phosphorothioate
  modified_base 3: mod_base = OTHER; note = 2'-O-methylguanosine-3'-phosphate
  modified_base 4: mod_base = OTHER; note = 2'-O-methyluridine-3'-phosphate
  modified_base 5: mod_base = OTHER; note = 2'-O-methylguanosine-3'-phosphate
  modified_base 6: mod_base = OTHER; note = 2'-O-methyladenosine-3'-phosphate
  modified_base 7: mod_base = OTHER; note = 2'-deoxy-2'-fluorocytidine-3'-phosphate
  modified_base 8: mod_base = OTHER; note = 2'-O-methyladenosine-3'-phosphate
  modified_base 9: mod_base = OTHER; note = 2'-deoxy-2'-fluoroadenosine-3'-phosphate
  modified_base 10: mod_base = OTHER; note = 2'-deoxy-2'-fluorocytidine-3'-phosphate
  modified_base 11: mod_base = OTHER; note = 2'-deoxy-2'-fluoroguanosine-3'-phosphate
  modified_base 12: mod_base = OTHER; note = 2'-O-methyluridine-3'-phosphate
  modified_base 13: mod_base = OTHER; note = 2'-O-methyladenosine-3'-phosphate
  modified_base 14: mod_base = OTHER; note = 2'-O-methylcytidine-3'-phosphate
  modified_base 15: mod_base = OTHER; note = 2'-O-methylcytidine-3'-phosphate
  modified_base 16: mod_base = OTHER; note = 2'-O-methylcytidine-3'-phosphate
  modified_base 17: mod_base = OTHER; note = 2'-O-methyluridine-3'-phosphate
  modified_base 18: mod_base = OTHER; note = 2'-O-methyluridine-3'-phosphate
  modified_base 19: mod_base = OTHER; note = 2'-O-methylcytidine-3'-phosphate
  modified_base 20: mod_base = OTHER; note = 2'-O-methyladenosine-3'-phosphate
  modified_base 21: mod_base = OTHER; note = 2'-O-methyluridine-3'-phosphate ((2S,4R)-1-[29-[[2-(acetylamino)-2-deoxy-beta-D-galactopyra nosyl]oxy]-14,14-bis[[3-[[3-[[5-[[2-(acetylamino)-2-deoxy-b eta-D-galactopyranosyl]oxy]-1-oxopentyl]amino]propyl]amino] -3-oxopropoxy]methyl]-1,12,19,25-tetraoxo-16-oxa-13,20,24-t riazanonacos-1-yl]-4-hydroxy-2-pyrrolidinyl)methyl ester
gagtgacaacgtacccttcat

SEQ ID NO: 828 - RNA, 21 nt, synthetic construct
  source 1..21: mol_type = other RNA
  modified_base 1: mod_base = OTHER; note = 2'-O-methyladenosine-3'-phosphorothioate
  modified_base 2: mod_base = OTHER; note = 2'-O-methylcytidine-3'-phosphorothioate
  modified_base 3: mod_base = OTHER; note = 2'-O-methylguanosine-3'-phosphate
  modified_base 4: mod_base = OTHER; note = 2'-O-methyluridine-3'-phosphate
  modified_base 5: mod_base = OTHER; note = 2'-O-methyladenosine-3'-phosphate
  modified_base 6: mod_base = OTHER; note = 2'-O-methylcytidine-3'-phosphate
  modified_base 7: mod_base = OTHER; note = 2'-deoxy-2'-fluorocytidine-3'-phosphate
  modified_base 8: mod_base = OTHER; note = 2'-O-methylcytidine-3'-phosphate
  modified_base 9: mod_base = OTHER; note = 2'-deoxy-2'-fluorouridine-3'-phosphate
  modified_base 10: mod_base = OTHER; note = 2'-deoxy-2'-fluorouridine-3'-phosphate
  modified_base 11: mod_base = OTHER; note = 2'-deoxy-2'-fluorocytidine-3'-phosphate
  modified_base 12: mod_base = OTHER; note = 2'-O-methyladenosine-3'-phosphate
  modified_base 13: mod_base = OTHER; note = 2'-O-methyluridine-3'-phosphate
  modified_base 14: mod_base = OTHER; note = 2'-O-methyluridine-3'-phosphate
  modified_base 15: mod_base = OTHER; note = 2'-O-methylguanosine-3'-phosphate
  modified_base 16: mod_base = OTHER; note = 2'-O-methyladenosine-3'-phosphate
  modified_base 17: mod_base = OTHER; note = 2'-O-methyluridine-3'-phosphate
  modified_base 18: mod_base = OTHER; note = 2'-O-methylguanosine-3'-phosphate
  modified_base 19: mod_base = OTHER; note = 2'-O-methylcytidine-3'-phosphate
  modified_base 20: mod_base = OTHER; note = 2'-O-methylcytidine-3'-phosphate
  modified_base 21: mod_base = OTHER; note = 2'-O-methyluridine-3'-phosphate ((2S,4R)-1-[29-[[2-(acetylamino)-2-deoxy-beta-D-galactopyra nosyl]oxy]-14,14-bis[[3-[[3-[[5-[[2-(acetylamino)-2-deoxy-b eta-D-galactopyranosyl]oxy]-1-oxopentyl]amino]propyl]amino] -3-oxopropoxy]methyl]-1,12,19,25-tetraoxo-16-oxa-13,20,24-t riazanonacos-1-yl]-4-hydroxy-2-pyrrolidinyl)methyl ester
acgtacccttcattgatgcct

SEQ ID NO: 829 - RNA, 21 nt, synthetic construct
  source 1..21: mol_type = other RNA
  modified_base 1: mod_base = OTHER; note = 2'-O-methyladenosine-3'-phosphorothioate
  modified_base 2: mod_base = OTHER; note = 2'-O-methylguanosine-3'-phosphorothioate
  modified_base 3: mod_base = OTHER; note = 2'-O-methyluridine-3'-phosphate
  modified_base 4: mod_base = OTHER; note = 2'-O-methyladenosine-3'-phosphate
  modified_base 5: mod_base = OTHER; note = 2'-O-methylcytidine-3'-phosphate
  modified_base 6: mod_base = OTHER; note = 2'-O-methylguanosine-3'-phosphate
  modified_base 7: mod_base = OTHER; note = 2'-deoxy-2'-fluoroadenosine-3'-phosphate
  modified_base 8: mod_base = OTHER; note = 2'-O-methylcytidine-3'-phosphate
  modified_base 9: mod_base = OTHER; note = 2'-deoxy-2'-fluoroadenosine-3'-phosphate
  modified_base 10: mod_base = OTHER; note = 2'-deoxy-2'-fluorouridine-3'-phosphate
  modified_base 11: mod_base = OTHER; note = 2'-deoxy-2'-fluorocytidine-3'-phosphate
  modified_base 12: mod_base = OTHER; note = 2'-O-methyluridine-3'-phosphate
  modified_base 13: mod_base = OTHER; note = 2'-O-methylguanosine-3'-phosphate
  modified_base 14: mod_base = OTHER; note = 2'-O-methylcytidine-3'-phosphate
  modified_base 15: mod_base = OTHER; note = 2'-O-methylcytidine-3'-phosphate
  modified_base 16: mod_base = OTHER; note = 2'-O-methylcytidine-3'-phosphate
  modified_base 17: mod_base = OTHER; note = 2'-O-methyluridine-3'-phosphate
  modified_base 18: mod_base = OTHER; note = 2'-O-methyladenosine-3'-phosphate
  modified_base 19: mod_base = OTHER; note = 2'-O-methyladenosine-3'-phosphate
  modified_base 20: mod_base = OTHER; note = 2'-O-methyladenosine-3'-phosphate
  modified_base 21: mod_base = OTHER; note = 2'-O-methyluridine-3'-phosphate ((2S,4R)-1-[29-[[2-(acetylamino)-2-deoxy-beta-D-galactopyra nosyl]oxy]-14,14-bis[[3-[[3-[[5-[[2-(acetylamino)-2-deoxy-b eta-D-galactopyranosyl]oxy]-1-oxopentyl]amino]propyl]amino] -3-oxopropoxy]methyl]-1,12,19,25-tetraoxo-16-oxa-13,20,24-t riazanonacos-1-yl]-4-hydroxy-2-pyrrolidinyl)methyl ester
agtacgacatctgccctaaat

SEQ ID NO: 830 - RNA, 21 nt, synthetic construct
  source 1..21: mol_type = other RNA
  modified_base 1: mod_base = OTHER; note = 2'-O-methyladenosine-3'-phosphorothioate
  modified_base 2: mod_base = OTHER; note = 2'-O-methyluridine-3'-phosphorothioate
  modified_base 3: mod_base = OTHER; note = 2'-O-methylcytidine-3'-phosphate
  modified_base 4: mod_base = OTHER; note = 2'-O-methyluridine-3'-phosphate
  modified_base 5: mod_base = OTHER; note = 2'-O-methylguanosine-3'-phosphate
  modified_base 6: mod_base = OTHER; note = 2'-O-methylcytidine-3'-phosphate
  modified_base 7: mod_base = OTHER; note = 2'-deoxy-2'-fluorocytidine-3'-phosphate
  modified_base 8: mod_base = OTHER; note = 2'-O-methylcytidine-3'-phosphate
  modified_base 9: mod_base = OTHER; note = 2'-deoxy-2'-fluorouridine-3'-phosphate
  modified_base 10: mod_base = OTHER; note = 2'-deoxy-2'-fluoroadenosine-3'-phosphate
  modified_base 11: mod_base = OTHER; note = 2'-deoxy-2'-fluoroadenosine-3'-phosphate
  modified_base 12: mod_base = OTHER; note = 2'-O-methyladenosine-3'-phosphate
  modified_base 13: mod_base = OTHER; note = 2'-O-methylguanosine-3'-phosphate
  modified_base 14: mod_base = OTHER; note = 2'-O-methyluridine-3'-phosphate
  modified_base 15: mod_base = OTHER; note = 2'-O-methylcytidine-3'-phosphate
  modified_base 16: mod_base = OTHER; note = 2'-O-methyladenosine-3'-phosphate
  modified_base 17: mod_base = OTHER; note = 2'-O-methyladenosine-3'-phosphate
  modified_base 18: mod_base = OTHER; note = 2'-O-methylguanosine-3'-phosphate
  modified_base 19: mod_base = OTHER; note = 2'-O-methyluridine-3'-phosphate
  modified_base 20: mod_base = OTHER; note = 2'-O-methylcytidine-3'-phosphate
  modified_base 21: mod_base = OTHER; note = 2'-O-methyluridine-3'-phosphate ((2S,4R)-1-[29-[[2-(acetylamino)-2-deoxy-beta-D-galactopyra nosyl]oxy]-14,14-bis[[3-[[3-[[5-[[2-(acetylamino)-2-deoxy-b eta-D-galactopyranosyl]oxy]-1-oxopentyl]amino]propyl]amino] -3-oxopropoxy]methyl]-1,12,19,25-tetraoxo-16-oxa-13,20,24-t riazanonacos-1-yl]-4-hydroxy-2-pyrrolidinyl)methyl ester
atctgccctaaagtcaagtct

SEQ ID NO: 831 - RNA, 21 nt, synthetic construct
  source 1..21: mol_type = other RNA
  modified_base 1: mod_base = OTHER; note = 2'-O-methylcytidine-3'-phosphorothioate
  modified_base 2: mod_base = OTHER; note = 2'-O-methyluridine-3'-phosphorothioate
  modified_base 3: mod_base = OTHER; note = 2'-O-methylcytidine-3'-phosphate
  modified_base 4: mod_base = OTHER; note = 2'-O-methyluridine-3'-phosphate
  modified_base 5: mod_base = OTHER; note = 2'-O-methylguanosine-3'-phosphate
  modified_base 6: mod_base = OTHER; note = 2'-O-methylcytidine-3'-phosphate
  modified_base 7: mod_base = OTHER; note = 2'-deoxy-2'-fluoroadenosine-3'-phosphate
  modified_base 8: mod_base = OTHER; note = 2'-O-methylcytidine-3'-phosphate
  modified_base 9: mod_base = OTHER; note = 2'-deoxy-2'-fluoroadenosine-3'-phosphate
  modified_base 10: mod_base = OTHER; note = 2'-deoxy-2'-fluoroguanosine-3'-phosphate
  modified_base 11: mod_base = OTHER; note = 2'-deoxy-2'-fluoroguanosine-3'-phosphate
  modified_base 12: mod_base = OTHER; note = 2'-O-methylguanosine-3'-phosphate
  modified_base 13: mod_base = OTHER; note = 2'-O-methyladenosine-3'-phosphate
  modified_base 14: mod_base = OTHER; note = 2'-O-methyladenosine-3'-phosphate
  modified_base 15: mod_base = OTHER; note = 2'-O-methylcytidine-3'-phosphate
  modified_base 16: mod_base = OTHER; note = 2'-O-methylcytidine-3'-phosphate
  modified_base 17: mod_base = OTHER; note = 2'-O-methyluridine-3'-phosphate
  modified_base 18: mod_base = OTHER; note = 2'-O-methylcytidine-3'-phosphate
  modified_base 19: mod_base = OTHER; note = 2'-O-methyluridine-3'-phosphate
  modified_base 20: mod_base = OTHER; note = 2'-O-methyladenosine-3'-phosphate
  modified_base 21: mod_base = OTHER; note = 2'-O-methyluridine-3'-phosphate ((2S,4R)-1-[29-[[2-(acetylamino)-2-deoxy-beta-D-galactopyra nosyl]oxy]-14,14-bis[[3-[[3-[[5-[[2-(acetylamino)-2-deoxy-b eta-D-galactopyranosyl]oxy]-1-oxopentyl]amino]propyl]amino] -3-oxopropoxy]methyl]-1,12,19,25-tetraoxo-16-oxa-13,20,24-t riazanonacos-1-yl]-4-hydroxy-2-pyrrolidinyl)methyl ester
ctctgcacagggaacctctat

SEQ ID NO: 832 - RNA, 21 nt, synthetic construct
  source 1..21: mol_type = other RNA
  modified_base 1: mod_base = OTHER; note = 2'-O-methyluridine-3'-phosphorothioate
  modified_base 2: mod_base = OTHER; note = 2'-O-methylcytidine-3'-phosphorothioate
  modified_base 3: mod_base = OTHER; note = 2'-O-methyluridine-3'-phosphate
  modified_base 4: mod_base = OTHER; note = 2'-O-methylguanosine-3'-phosphate
  modified_base 5: mod_base = OTHER; note = 2'-O-methylcytidine-3'-phosphate
  modified_base 6: mod_base = OTHER; note = 2'-O-methyladenosine-3'-phosphate
  modified_base 7: mod_base = OTHER; note = 2'-deoxy-2'-fluorocytidine-3'-phosphate
  modified_base 8: mod_base = OTHER; note = 2'-O-methyladenosine-3'-phosphate
  modified_base 9: mod_base = OTHER; note = 2'-deoxy-2'-fluoroguanosine-3'-phosphate
  modified_base 10: mod_base = OTHER; note = 2'-deoxy-2'-fluoroguanosine-3'-phosphate
  modified_base 11: mod_base = OTHER; note = 2'-deoxy-2'-fluoroguanosine-3'-phosphate
  modified_base 12: mod_base = OTHER; note = 2'-O-methyladenosine-3'-phosphate
  modified_base 13: mod_base = OTHER; note = 2'-O-methyladenosine-3'-phosphate
  modified_base 14: mod_base = OTHER; note = 2'-O-methylcytidine-3'-phosphate
  modified_base 15: mod_base = OTHER; note = 2'-O-methylcytidine-3'-phosphate
  modified_base 16: mod_base = OTHER; note = 2'-O-methyluridine-3'-phosphate
  modified_base 17: mod_base = OTHER; note = 2'-O-methylcytidine-3'-phosphate
  modified_base 18: mod_base = OTHER; note = 2'-O-methyluridine-3'-phosphate
  modified_base 19: mod_base = OTHER; note = 2'-O-methyladenosine-3'-phosphate
  modified_base 20: mod_base = OTHER; note = 2'-O-methylcytidine-3'-phosphate
  modified_base 21: mod_base = OTHER; note = 2'-O-methyluridine-3'-phosphate ((2S,4R)-1-[29-[[2-(acetylamino)-2-deoxy-beta-D-galactopyra nosyl]oxy]-14,14-bis[[3-[[3-[[5-[[2-(acetylamino)-2-deoxy-b eta-D-galactopyranosyl]oxy]-1-oxopentyl]amino]propyl]amino] -3-oxopropoxy]methyl]-1,12,19,25-tetraoxo-16-oxa-13,20,24-t riazanonacos-1-yl]-4-hydroxy-2-pyrrolidinyl)methyl ester
tctgcacagggaacctctact

SEQ ID NO: 833 - RNA, 21 nt, synthetic construct
  source 1..21: mol_type = other RNA
  modified_base 1: mod_base = OTHER; note = 2'-O-methyladenosine-3'-phosphorothioate
  modified_base 2: mod_base = OTHER; note = 2'-O-methylcytidine-3'-phosphorothioate
  modified_base 3: mod_base = OTHER; note = 2'-O-methyladenosine-3'-phosphate
  modified_base 4: mod_base = OTHER; note = 2'-O-methylguanosine-3'-phosphate
  modified_base 5: mod_base = OTHER; note = 2'-O-methylguanosine-3'-phosphate
  modified_base 6: mod_base = OTHER; note = 2'-O-methylguanosine-3'-phosphate
  modified_base 7: mod_base = OTHER; note = 2'-deoxy-2'-fluoroadenosine-3'-phosphate
  modified_base 8: mod_base = OTHER; note = 2'-O-methyladenosine-3'-phosphate
  modified_base 9: mod_base = OTHER; note = 2'-deoxy-2'-fluorocytidine-3'-phosphate
  modified_base 10: mod_base = OTHER; note = 2'-deoxy-2'-fluorocytidine-3'-phosphate
  modified_base 11: mod_base = OTHER; note = 2'-deoxy-2'-fluorouridine-3'-phosphate
  modified_base 12: mod_base = OTHER; note = 2'-O-methylcytidine-3'-phosphate
  modified_base 13: mod_base = OTHER; note = 2'-O-methyluridine-3'-phosphate
  modified_base 14: mod_base = OTHER; note = 2'-O-methyladenosine-3'-phosphate
  modified_base 15: mod_base = OTHER; note = 2'-O-methylcytidine-3'-phosphate
  modified_base 16: mod_base = OTHER; note = 2'-O-methylcytidine-3'-phosphate
  modified_base 17: mod_base = OTHER; note = 2'-O-methyluridine-3'-phosphate
  modified_base 18: mod_base = OTHER; note = 2'-O-methyluridine-3'-phosphate
  modified_base 19: mod_base = OTHER; note = 2'-O-methylcytidine-3'-phosphate
  modified_base 20: mod_base = OTHER; note = 2'-O-methyluridine-3'-phosphate
  modified_base 21: mod_base = OTHER; note = 2'-O-methyluridine-3'-phosphate ((2S,4R)-1-[29-[[2-(acetylamino)-2-deoxy-beta-D-galactopyra nosyl]oxy]-14,14-bis[[3-[[3-[[5-[[2-(acetylamino)-2-deoxy-b eta-D-galactopyranosyl]oxy]-1-oxopentyl]amino]propyl]amino] -3-oxopropoxy]methyl]-1,12,19,25-tetraoxo-16-oxa-13,20,24-t riazanonacos-1-yl]-4-hydroxy-2-pyrrolidinyl)methyl ester
acagggaacctctaccttctt

SEQ ID NO: 834 - RNA, 21 nt, synthetic construct
  source 1..21: mol_type = other RNA
  modified_base 1: mod_base = OTHER; note = 2'-O-methylcytidine-3'-phosphorothioate
  modified_base 2: mod_base = OTHER; note = 2'-O-methyluridine-3'-phosphorothioate
  modified_base 3: mod_base = OTHER; note = 2'-O-methylguanosine-3'-phosphate
  modified_base 4: mod_base = OTHER; note = 2'-O-methylguanosine-3'-phosphate
  modified_base 5: mod_base = OTHER; note = 2'-O-methylguanosine-3'-phosphate
  modified_base 6: mod_base = OTHER; note = 2'-O-methyladenosine-3'-phosphate
  modified_base 7: mod_base = OTHER; note = 2'-deoxy-2'-fluoroguanosine-3'-phosphate
  modified_base 8: mod_base = OTHER; note = 2'-O-methyladenosine-3'-phosphate
  modified_base 9: mod_base = OTHER; note = 2'-deoxy-2'-fluoroguanosine-3'-phosphate
  modified_base 10: mod_base = OTHER; note = 2'-deoxy-2'-fluoroadenosine-3'-phosphate
  modified_base 11: mod_base = OTHER; note = 2'-deoxy-2'-fluorouridine-3'-phosphate
  modified_base 12: mod_base = OTHER; note = 2'-O-methyladenosine-3'-phosphate
  modified_base 13: mod_base = OTHER; note = 2'-O-methyluridine-3'-phosphate
  modified_base 14: mod_base = OTHER; note = 2'-O-methylguanosine-3'-phosphate
  modified_base 15: mod_base = OTHER; note = 2'-O-methylcytidine-3'-phosphate
  modified_base 16: mod_base = OTHER; note = 2'-O-methylcytidine-3'-phosphate
  modified_base 17: mod_base = OTHER; note = 2'-O-methyluridine-3'-phosphate
  modified_base 18: mod_base = OTHER; note = 2'-O-methyluridine-3'-phosphate
  modified_base 19: mod_base = OTHER; note = 2'-O-methylcytidine-3'-phosphate
  modified_base 20: mod_base = OTHER; note = 2'-O-methylguanosine-3'-phosphate
  modified_base 21: mod_base = OTHER; note = 2'-O-methyluridine-3'-phosphate ((2S,4R)-1-[29-[[2-(acetylamino)-2-deoxy-beta-D-galactopyra nosyl]oxy]-14,14-bis[[3-[[3-[[5-[[2-(acetylamino)-2-deoxy-b eta-D-galactopyranosyl]oxy]-1-oxopentyl]amino]propyl]amino] -3-oxopropoxy]methyl]-1,12,19,25-tetraoxo-16-oxa-13,20,24-t riazanonacos-1-yl]-4-hydroxy-2-pyrrolidinyl)methyl ester
ctgggagagatatgccttcgt

SEQ ID NO: 835 - RNA, 21 nt, synthetic construct
  source 1..21: mol_type = other RNA
  modified_base 1: mod_base = OTHER; note = 2'-O-methyladenosine-3'-phosphorothioate
  modified_base 2: mod_base = OTHER; note = 2'-O-methylguanosine-3'-phosphorothioate
  modified_base 3: mod_base = OTHER; note = 2'-O-methyladenosine-3'-phosphate
  modified_base 4: mod_base = OTHER; note = 2'-O-methylguanosine-3'-phosphate
  modified_base 5: mod_base = OTHER; note = 2'-O-methyladenosine-3'-phosphate
  modified_base 6: mod_base = OTHER; note = 2'-O-methyluridine-3'-phosphate
  modified_base 7: mod_base = OTHER; note = 2'-deoxy-2'-fluoroadenosine-3'-phosphate
  modified_base 8: mod_base = OTHER; note = 2'-O-methyluridine-3'-phosphate
  modified_base 9: mod_base = OTHER; note = 2'-deoxy-2'-fluoroguanosine-3'-phosphate
  modified_base 10: mod_base = OTHER; note = 2'-deoxy-2'-fluorocytidine-3'-phosphate
  modified_base 11: mod_base = OTHER; note = 2'-deoxy-2'-fluorocytidine-3'-phosphate
  modified_base 12: mod_base = OTHER; note = 2'-O-methyluridine-3'-phosphate
  modified_base 13: mod_base = OTHER; note = 2'-O-methyluridine-3'-phosphate
  modified_base 14: mod_base = OTHER; note = 2'-O-methylcytidine-3'-phosphate
  modified_base 15: mod_base = OTHER; note = 2'-O-methylguanosine-3'-phosphate
  modified_base 16: mod_base = OTHER; note = 2'-O-methyladenosine-3'-phosphate
  modified_base 17: mod_base = OTHER; note = 2'-O-methylguanosine-3'-phosphate
  modified_base 18: mod_base = OTHER; note = 2'-O-methylguanosine-3'-phosphate
  modified_base 19: mod_base = OTHER; note = 2'-O-methyladenosine-3'-phosphate
  modified_base 20: mod_base = OTHER; note = 2'-O-methyluridine-3'-phosphate
  modified_base 21: mod_base = OTHER; note = 2'-O-methyluridine-3'-phosphate ((2S,4R)-1-[29-[[2-(acetylamino)-2-deoxy-beta-D-galactopyra nosyl]oxy]-14,14-bis[[3-[[3-[[5-[[2-(acetylamino)-2-deoxy-b eta-D-galactopyranosyl]oxy]-1-oxopentyl]amino]propyl]amino] -3-oxopropoxy]methyl]-1,12,19,25-tetraoxo-16-oxa-13,20,24-t riazanonacos-1-yl]-4-hydroxy-2-pyrrolidinyl)methyl ester
agagatatgccttcgaggatt

SEQ ID NO: 836 - RNA, 21 nt, synthetic construct
  source 1..21: mol_type = other RNA
  modified_base 1: mod_base = OTHER; note = 2'-O-methyladenosine-3'-phosphorothioate
  modified_base 2: mod_base = OTHER; note = 2'-O-methylguanosine-3'-phosphorothioate
  modified_base 3: mod_base = OTHER; note = 2'-O-methyladenosine-3'-phosphate
  modified_base 4: mod_base = OTHER; note = 2'-O-methyluridine-3'-phosphate
  modified_base 5: mod_base = OTHER; note = 2'-O-methyladenosine-3'-phosphate
  modified_base 6: mod_base = OTHER; note = 2'-O-methyluridine-3'-phosphate
  modified_base 7: mod_base = OTHER; note = 2'-deoxy-2'-fluoroguanosine-3'-phosphate
  modified_base 8: mod_base = OTHER; note = 2'-O-methylcytidine-3'-phosphate
  modified_base 9: mod_base = OTHER; note = 2'-deoxy-2'-fluorocytidine-3'-phosphate
  modified_base 10: mod_base = OTHER; note = 2'-deoxy-2'-fluorouridine-3'-phosphate
  modified_base 11: mod_base = OTHER; note = 2'-deoxy-2'-fluorouridine-3'-phosphate
  modified_base 12: mod_base = OTHER; note = 2'-O-methylcytidine-3'-phosphate
  modified_base 13: mod_base = OTHER; note = 2'-O-methylguanosine-3'-phosphate
  modified_base 14: mod_base = OTHER; note = 2'-O-methyladenosine-3'-phosphate
  modified_base 15: mod_base = OTHER; note = 2'-O-methylguanosine-3'-phosphate
  modified_base 16: mod_base = OTHER; note = 2'-O-methylguanosine-3'-phosphate
  modified_base 17: mod_base = OTHER; note = 2'-O-methyladenosine-3'-phosphate
  modified_base 18: mod_base = OTHER; note = 2'-O-methyluridine-3'-phosphate
  modified_base 19: mod_base = OTHER; note = 2'-O-methyladenosine-3'-phosphate
  modified_base 20: mod_base = OTHER; note = 2'-O-methyluridine-3'-phosphate
  modified_base 21: mod_base = OTHER; note = 2'-O-methyluridine-3'-phosphate ((2S,4R)-1-[29-[[2-(acetylamino)-2-deoxy-beta-D-galactopyra nosyl]oxy]-14,14-bis[[3-[[3-[[5-[[2-(acetylamino)-2-deoxy-b eta-D-galactopyranosyl]oxy]-1-oxopentyl]amino]propyl]amino] -3-oxopropoxy]methyl]-1,12,19,25-tetraoxo-16-oxa-13,20,24-t riazanonacos-1-yl]-4-hydroxy-2-pyrrolidinyl)methyl ester
agatatgccttcgaggatatt

SEQ ID NO: 837 - RNA, 21 nt, synthetic construct
  source 1..21: mol_type = other RNA
  modified_base 1: mod_base = OTHER; note = 2'-O-methylguanosine-3'-phosphorothioate
  modified_base 2: mod_base = OTHER; note = 2'-O-methyladenosine-3'-phosphorothioate
  modified_base 3: mod_base = OTHER; note = 2'-O-methyladenosine-3'-phosphate
  modified_base 4: mod_base = OTHER; note = 2'-O-methylguanosine-3'-phosphate
  modified_base 5: mod_base = OTHER; note = 2'-O-methyladenosine-3'-phosphate
  modified_base 6: mod_base = OTHER; note = 2'-O-methylguanosine-3'-phosphate
  modified_base 7: mod_base = OTHER; note = 2'-deoxy-2'-fluoroadenosine-3'-phosphate
  modified_base 8: mod_base = OTHER; note = 2'-O-methyladenosine-3'-phosphate
  modified_base 9: mod_base = OTHER; note = 2'-deoxy-2'-fluoroguanosine-3'-phosphate
  modified_base 10: mod_base = OTHER; note = 2'-deoxy-2'-fluoroguanosine-3'-phosphate
  modified_base 11: mod_base = OTHER; note = 2'-deoxy-2'-fluoroguanosine-3'-phosphate
  modified_base 12: mod_base = OTHER; note = 2'-O-methylcytidine-3'-phosphate
  modified_base 13: mod_base = OTHER; note = 2'-O-methyladenosine-3'-phosphate
  modified_base 14: mod_base = OTHER; note = 2'-O-methyluridine-3'-phosphate
  modified_base 15: mod_base = OTHER; note = 2'-O-methylcytidine-3'-phosphate
  modified_base 16: mod_base = OTHER; note = 2'-O-methyluridine-3'-phosphate
  modified_base 17: mod_base = OTHER; note = 2'-O-methylguanosine-3'-phosphate
  modified_base 18: mod_base = OTHER; note = 2'-O-methylcytidine-3'-phosphate
  modified_base 19: mod_base = OTHER; note = 2'-O-methyladenosine-3'-phosphate
  modified_base 20: mod_base = OTHER; note = 2'-O-methyladenosine-3'-phosphate
  modified_base 21: mod_base = OTHER; note = 2'-O-methyluridine-3'-phosphate ((2S,4R)-1-[29-[[2-(acetylamino)-2-deoxy-beta-D-galactopyra nosyl]oxy]-14,14-bis[[3-[[3-[[5-[[2-(acetylamino)-2-deoxy-b eta-D-galactopyranosyl]oxy]-1-oxopentyl]amino]propyl]amino] -3-oxopropoxy]methyl]-1,12,19,25-tetraoxo-16-oxa-13,20,24-t riazanonacos-1-yl]-4-hydroxy-2-pyrrolidinyl)methyl ester
gaagagaagggcatctgcaat

SEQ ID NO: 838 - RNA, 21 nt, synthetic construct
  source 1..21: mol_type = other RNA
  modified_base 1: mod_base = OTHER; note = 2'-O-methylguanosine-3'-phosphorothioate
  modified_base 2: mod_base = OTHER; note = 2'-O-methyladenosine-3'-phosphorothioate
  modified_base 3: mod_base = OTHER; note = 2'-O-methylguanosine-3'-phosphate
  modified_base 4: mod_base = OTHER; note = 2'-O-methylcytidine-3'-phosphate
  modified_base 5: mod_base = OTHER; note = 2'-O-methyluridine-3'-phosphate
  modified_base 6: mod_base = OTHER; note = 2'-O-methylguanosine-3'-phosphate
  modified_base 7: mod_base = OTHER; note = 2'-deoxy-2'-fluorocytidine-3'-phosphate
  modified_base 8: mod_base = OTHER; note = 2'-O-methyluridine-3'-phosphate
  modified_base 9: mod_base = OTHER; note = 2'-deoxy-2'-fluoroadenosine-3'-phosphate
  modified_base 10: mod_base = OTHER; note = 2'-deoxy-2'-fluoroguanosine-3'-phosphate
  modified_base 11: mod_base = OTHER; note = 2'-deoxy-2'-fluoroadenosine-3'-phosphate
  modified_base 12: mod_base = OTHER; note = 2'-O-methylcytidine-3'-phosphate
  modified_base 13: mod_base = OTHER; note = 2'-O-methylcytidine-3'-phosphate
  modified_base 14: mod_base = OTHER; note = 2'-O-methyladenosine-3'-phosphate
  modified_base 15: mod_base = OTHER; note = 2'-O-methylcytidine-3'-phosphate
  modified_base 16: mod_base = OTHER; note = 2'-O-methylcytidine-3'-phosphate
  modified_base 17: mod_base = OTHER; note = 2'-O-methyluridine-3'-phosphate
  modified_base 18: mod_base = OTHER; note = 2'-O-methylguanosine-3'-phosphate
  modified_base 19: mod_base = OTHER; note = 2'-O-methylcytidine-3'-phosphate
  modified_base 20: mod_base = OTHER; note = 2'-O-methylguanosine-3'-phosphate
  modified_base 21: mod_base = OTHER; note = 2'-O-methyluridine-3'-phosphate ((2S,4R)-1-[29-[[2-(acetylamino)-2-deoxy-beta-D-galactopyra nosyl]oxy]-14,14-bis[[3-[[3-[[5-[[2-(acetylamino)-2-deoxy-b eta-D-galactopyranosyl]oxy]-1-oxopentyl]amino]propyl]amino] -3-oxopropoxy]methyl]-1,12,19,25-tetraoxo-16-oxa-13,20,24-t riazanonacos-1-yl]-4-hydroxy-2-pyrrolidinyl)methyl ester
gagctgctagaccacctgcgt

SEQ ID NO: 839 - RNA, 21 nt, synthetic construct
  source 1..21: mol_type = other RNA
  modified_base 1: mod_base = OTHER; note = 2'-O-methylguanosine-3'-phosphorothioate
  modified_base 2: mod_base = OTHER; note = 2'-O-methyladenosine-3'-phosphorothioate
  modified_base 3: mod_base = OTHER; note = 2'-O-methylcytidine-3'-phosphate
  modified_base 4: mod_base = OTHER; note = 2'-O-methylcytidine-3'-phosphate
  modified_base 5: mod_base = OTHER; note = 2'-O-methyladenosine-3'-phosphate
  modified_base 6: mod_base = OTHER; note = 2'-O-methylcytidine-3'-phosphate
  modified_base 7: mod_base = OTHER; note = 2'-deoxy-2'-fluorocytidine-3'-phosphate
  modified_base 8: mod_base = OTHER; note = 2'-O-methyluridine-3'-phosphate
  modified_base 9: mod_base = OTHER; note = 2'-deoxy-2'-fluoroguanosine-3'-phosphate
  modified_base 10: mod_base = OTHER; note = 2'-deoxy-2'-fluorocytidine-3'-phosphate
  modified_base 11: mod_base = OTHER; note = 2'-deoxy-2'-fluoroguanosine-3'-phosphate
  modified_base 12: mod_base = OTHER; note = 2'-O-methyluridine-3'-phosphate
  modified_base 13: mod_base = OTHER; note = 2'-O-methylcytidine-3'-phosphate
  modified_base 14: mod_base = OTHER; note = 2'-O-methyluridine-3'-phosphate
  modified_base 15: mod_base = OTHER; note = 2'-O-methylcytidine-3'-phosphate
  modified_base 16: mod_base = OTHER; note = 2'-O-methyladenosine-3'-phosphate
  modified_base 17: mod_base = OTHER; note = 2'-O-methylguanosine-3'-phosphate
  modified_base 18: mod_base = OTHER; note = 2'-O-methylcytidine-3'-phosphate
  modified_base 19: mod_base = OTHER; note = 2'-O-methyladenosine-3'-phosphate
  modified_base 20: mod_base = OTHER; note = 2'-O-methyluridine-3'-phosphate
  modified_base 21: mod_base = OTHER; note = 2'-O-methyluridine-3'-phosphate ((2S,4R)-1-[29-[[2-(acetylamino)-2-deoxy-beta-D-galactopyra nosyl]oxy]-14,14-bis[[3-[[3-[[5-[[2-(acetylamino)-2-deoxy-b eta-D-galactopyranosyl]oxy]-1-oxopentyl]amino]propyl]amino] -3-oxopropoxy]methyl]-1,12,19,25-tetraoxo-16-oxa-13,20,24-t riazanonacos-1-yl]-4-hydroxy-2-pyrrolidinyl)methyl ester
gaccacctgcgtctcagcatt

SEQ ID NO: 840 - RNA, 21 nt, synthetic construct
  source 1..21: mol_type = other RNA
  modified_base 1: mod_base = OTHER; note = 2'-O-methylcytidine-3'-phosphorothioate
  modified_base 2: mod_base = OTHER; note = 2'-O-methyladenosine-3'-phosphorothioate
  modified_base 3: mod_base = OTHER; note = 2'-O-methylcytidine-3'-phosphate
  modified_base 4: mod_base = OTHER; note = 2'-O-methylcytidine-3'-phosphate
  modified_base 5: mod_base = OTHER; note = 2'-O-methyluridine-3'-phosphate
  modified_base 6: mod_base = OTHER; note = 2'-O-methylguanosine-3'-phosphate
  modified_base 7: mod_base = OTHER; note = 2'-deoxy-2'-fluorocytidine-3'-phosphate
  modified_base 8: mod_base = OTHER; note = 2'-O-methylguanosine-3'-phosphate
  modified_base 9: mod_base = OTHER; note = 2'-deoxy-2'-fluorouridine-3'-phosphate
  modified_base 10: mod_base = OTHER; note = 2'-deoxy-2'-fluorocytidine-3'-phosphate
  modified_base 11: mod_base = OTHER; note = 2'-deoxy-2'-fluorouridine-3'-phosphate
  modified_base 12: mod_base = OTHER; note = 2'-O-methylcytidine-3'-phosphate
  modified_base 13: mod_base = OTHER; note = 2'-O-methyladenosine-3'-phosphate
  modified_base 14: mod_base = OTHER; note = 2'-O-methylguanosine-3'-phosphate
  modified_base 15: mod_base = OTHER; note = 2'-O-methylcytidine-3'-phosphate
  modified_base 16: mod_base = OTHER; note = 2'-O-methyladenosine-3'-phosphate
  modified_base 17: mod_base = OTHER; note = 2'-O-methyluridine-3'-phosphate
  modified_base 18: mod_base = OTHER; note = 2'-O-methylcytidine-3'-phosphate
  modified_base 19: mod_base = OTHER; note = 2'-O-methylcytidine-3'-phosphate
  modified_base 20: mod_base = OTHER; note = 2'-O-methyluridine-3'-phosphate
  modified_base 21: mod_base = OTHER; note = 2'-O-methyluridine-3'-phosphate ((2S,4R)-1-[29-[[2-(acetylamino)-2-deoxy-beta-D-galactopyra nosyl]oxy]-14,14-bis[[3-[[3-[[5-[[2-(acetylamino)-2-deoxy-b eta-D-galactopyranosyl]oxy]-1-oxopentyl]amino]propyl]amino] -3-oxopropoxy]methyl]-1,12,19,25-tetraoxo-16-oxa-13,20,24-t riazanonacos-1-yl]-4-hydroxy-2-pyrrolidinyl)methyl ester
cacctgcgtctcagcatcctt

SEQ ID NO: 841 - RNA, 21 nt, synthetic construct
  source 1..21: mol_type = other RNA
  modified_base 1: mod_base = OTHER; note = 2'-O-methylcytidine-3'-phosphorothioate
  modified_base 2: mod_base = OTHER; note = 2'-O-methylcytidine-3'-phosphorothioate
  modified_base 3: mod_base = OTHER; note = 2'-O-methylcytidine-3'-phosphate
  modified_base 4: mod_base = OTHER; note = 2'-O-methyluridine-3'-phosphate
  modified_base 5: mod_base = OTHER; note = 2'-O-methylguanosine-3'-phosphate
  modified_base 6: mod_base = OTHER; note = 2'-O-methylguanosine-3'-phosphate
  modified_base 7: mod_base = OTHER; note = 2'-deoxy-2'-fluoroguanosine-3'-phosphate
  modified_base 8: mod_base = OTHER; note = 2'-O-methyladenosine-3'-phosphate
  modified_base 9: mod_base = OTHER; note = 2'-deoxy-2'-fluorouridine-3'-phosphate
  modified_base 10: mod_base = OTHER; note = 2'-deoxy-2'-fluoroguanosine-3'-phosphate
  modified_base 11: mod_base = OTHER; note = 2'-deoxy-2'-fluoroadenosine-3'-phosphate
  modified_base 12: mod_base = OTHER; note = 2'-O-methylguanosine-3'-phosphate
  modified_base 13: mod_base = OTHER; note = 2'-O-methyladenosine-3'-phosphate
  modified_base 14: mod_base = OTHER; note = 2'-O-methylguanosine-3'-phosphate
  modified_base 15: mod_base = OTHER; note = 2'-O-methylcytidine-3'-phosphate
  modified_base 16: mod_base = OTHER; note = 2'-O-methyladenosine-3'-phosphate
  modified_base 17: mod_base = OTHER; note = 2'-O-methyluridine-3'-phosphate
  modified_base 18: mod_base = OTHER; note = 2'-O-methylcytidine-3'-phosphate
  modified_base 19: mod_base = OTHER; note = 2'-O-methylcytidine-3'-phosphate
  modified_base 20: mod_base = OTHER; note = 2'-O-methyluridine-3'-phosphate
  modified_base 21: mod_base = OTHER; note = 2'-O-methyluridine-3'-phosphate ((2S,4R)-1-[29-[[2-(acetylamino)-2-deoxy-beta-D-galactopyra nosyl]oxy]-14,14-bis[[3-[[3-[[5-[[2-(acetylamino)-2-deoxy-b eta-D-galactopyranosyl]oxy]-1-oxopentyl]amino]propyl]amino] -3-oxopropoxy]methyl]-1,12,19,25-tetraoxo-16-oxa-13,20,24-t riazanonacos-1-yl]-4-hydroxy-2-pyrrolidinyl)methyl ester
ccctgggatgagagcatcctt

SEQ ID NO: 842 - RNA, 21 nt, synthetic construct
  source 1..21: mol_type = other RNA
  modified_base 1: mod_base = OTHER; note = 2'-O-methyladenosine-3'-phosphorothioate
  modified_base 2: mod_base = OTHER; note = 2'-O-methylguanosine-3'-phosphorothioate
  modified_base 3: mod_base = OTHER; note = 2'-O-methylguanosine-3'-phosphate
  modified_base 4: mod_base = OTHER; note = 2'-O-methyluridine-3'-phosphate
  modified_base 5: mod_base = OTHER; note = 2'-O-methylguanosine-3'-phosphate
  modified_base 6: mod_base = OTHER; note = 2'-O-methylguanosine-3'-phosphate
  modified_base 7: mod_base = OTHER; note = 2'-deoxy-2'-fluoroadenosine-3'-phosphate
  modified_base 8: mod_base = OTHER; note = 2'-O-methyluridine-3'-phosphate
  modified_base 9: mod_base = OTHER; note = 2'-deoxy-2'-fluoroadenosine-3'-phosphate
  modified_base 10: mod_base = OTHER; note = 2'-deoxy-2'-fluorocytidine-3'-phosphate
  modified_base 11: mod_base = OTHER; note = 2'-deoxy-2'-fluoroadenosine-3'-phosphate
  modified_base 12: mod_base = OTHER; note = 2'-O-methyluridine-3'-phosphate
  modified_base 13: mod_base = OTHER; note = 2'-O-methylguanosine-3'-phosphate
  modified_base 14: mod_base = OTHER; note = 2'-O-methyladenosine-3'-phosphate
  modified_base 15: mod_base = OTHER; note = 2'-O-methylguanosine-3'-phosphate
  modified_base 16: mod_base = OTHER; note = 2'-O-methylcytidine-3'-phosphate
  modified_base 17: mod_base = OTHER; note = 2'-O-methyladenosine-3'-phosphate
  modified_base 18: mod_base = OTHER; note = 2'-O-methyladenosine-3'-phosphate
  modified_base 19: mod_base = OTHER; note = 2'-O-methylguanosine-3'-phosphate
  modified_base 20: mod_base = OTHER; note = 2'-O-methyladenosine-3'-phosphate
  modified_base 21: mod_base = OTHER; note = 2'-O-methyluridine-3'-phosphate ((2S,4R)-1-[29-[[2-(acetylamino)-2-deoxy-beta-D-galactopyra nosyl]oxy]-14,14-bis[[3-[[3-[[5-[[2-(acetylamino)-2-deoxy-b eta-D-galactopyranosyl]oxy]-1-oxopentyl]amino]propyl]amino] -3-oxopropoxy]methyl]-1,12,19,25-tetraoxo-16-oxa-13,20,24-t riazanonacos-1-yl]-4-hydroxy-2-pyrrolidinyl)methyl ester
aggtggatacatgagcaagat

SEQ ID NO: 843 - RNA, 21 nt, synthetic construct
  source 1..21: mol_type = other RNA
  modified_base 1: mod_base = OTHER; note = 2'-O-methylguanosine-3'-phosphorothioate
  modified_base 2: mod_base = OTHER; note = 2'-O-methylguanosine-3'-phosphorothioate
  modified_base 3: mod_base = OTHER; note = 2'-O-methyluridine-3'-phosphate
  modified_base 4: mod_base = OTHER; note = 2'-O-methylguanosine-3'-phosphate
  modified_base 5: mod_base = OTHER; note = 2'-O-methylguanosine-3'-phosphate
  modified_base 6: mod_base = OTHER; note = 2'-O-methyladenosine-3'-phosphate
  modified_base 7: mod_base = OTHER; note = 2'-deoxy-2'-fluorouridine-3'-phosphate
  modified_base 8: mod_base = OTHER; note = 2'-O-methyladenosine-3'-phosphate
  modified_base 9: mod_base = OTHER; note = 2'-deoxy-2'-fluorocytidine-3'-phosphate
  modified_base 10: mod_base = OTHER; note = 2'-deoxy-2'-fluoroadenosine-3'-phosphate
  modified_base 11: mod_base = OTHER; note = 2'-deoxy-2'-fluorouridine-3'-phosphate
  modified_base 12: mod_base = OTHER; note = 2'-O-methylguanosine-3'-phosphate
  modified_base 13: mod_base = OTHER; note = 2'-O-methyladenosine-3'-phosphate
  modified_base 14: mod_base = OTHER; note = 2'-O-methylguanosine-3'-phosphate
  modified_base 15: mod_base = OTHER; note = 2'-O-methylcytidine-3'-phosphate
  modified_base 16: mod_base = OTHER; note = 2'-O-methyladenosine-3'-phosphate
  modified_base 17: mod_base = OTHER; note = 2'-O-methyladenosine-3'-phosphate
  modified_base 18: mod_base = OTHER; note = 2'-O-methylguanosine-3'-phosphate
  modified_base 19: mod_base = OTHER; note = 2'-O-methyladenosine-3'-phosphate
  modified_base 20: mod_base = OTHER; note = 2'-O-methyluridine-3'-phosphate
  modified_base 21: mod_base = OTHER; note = 2'-O-methyluridine-3'-phosphate ((2S,4R)-1-[29-[[2-(acetylamino)-2-deoxy-beta-D-galactopyra nosyl]oxy]-14,14-bis[[3-[[3-[[5-[[2-(acetylamino)-2-deoxy-b eta-D-galactopyranosyl]oxy]-1-oxopentyl]amino]propyl]amino] -3-oxopropoxy]methyl]-1,12,19,25-tetraoxo-16-oxa-13,20,24-t riazanonacos-1-yl]-4-hydroxy-2-pyrrolidinyl)methyl ester
ggtggatacatgagcaagatt

SEQ ID NO: 844 - RNA, 21 nt, synthetic construct
  source 1..21: mol_type = other RNA
  modified_base 1: mod_base = OTHER; note = 2'-O-methylcytidine-3'-phosphorothioate
  modified_base 2: mod_base = OTHER; note = 2'-O-methyladenosine-3'-phosphorothioate
  modified_base 3: mod_base = OTHER; note = 2'-O-methyluridine-3'-phosphate
  modified_base 4: mod_base = OTHER; note = 2'-O-methylguanosine-3'-phosphate
  modified_base 5: mod_base = OTHER; note = 2'-O-methyladenosine-3'-phosphate
  modified_base 6: mod_base = OTHER; note = 2'-O-methylguanosine-3'-phosphate
  modified_base 7: mod_base = OTHER; note = 2'-deoxy-2'-fluorocytidine-3'-phosphate
  modified_base 8: mod_base = OTHER; note = 2'-O-methyladenosine-3'-phosphate
  modified_base 9: mod_base = OTHER; note = 2'-deoxy-2'-fluoroadenosine-3'-phosphate
  modified_base 10: mod_base = OTHER; note = 2'-deoxy-2'-fluoroguanosine-3'-phosphate
  modified_base 11: mod_base = OTHER; note = 2'-deoxy-2'-fluoroadenosine-3'-phosphate
  modified_base 12: mod_base = OTHER; note = 2'-O-methyluridine-3'-phosphate
  modified_base 13: mod_base = OTHER; note = 2'-O-methyluridine-3'-phosphate
  modified_base 14: mod_base = OTHER; note = 2'-O-methyluridine-3'-phosphate
  modified_base 15: mod_base = OTHER; note = 2'-O-methylguanosine-3'-phosphate
  modified_base 16: mod_base = OTHER; note = 2'-O-methylcytidine-3'-phosphate
  modified_base 17: mod_base = OTHER; note = 2'-O-methyladenosine-3'-phosphate
  modified_base 18: mod_base = OTHER; note = 2'-O-methyladenosine-3'-phosphate
  modified_base 19: mod_base = OTHER; note = 2'-O-methylcytidine-3'-phosphate
  modified_base 20: mod_base = OTHER; note = 2'-O-methyluridine-3'-phosphate
  modified_base 21: mod_base = OTHER; note = 2'-O-methyluridine-3'-phosphate ((2S,4R)-1-[29-[[2-(acetylamino)-2-deoxy-beta-D-galactopyra nosyl]oxy]-14,14-bis[[3-[[3-[[5-[[2-(acetylamino)-2-deoxy-b eta-D-galactopyranosyl]oxy]-1-oxopentyl]amino]propyl]amino] -3-oxopropoxy]methyl]-1,12,19,25-tetraoxo-16-oxa-13,20,24-t riazanonacos-1-yl]-4-hydroxy-2-pyrrolidinyl)methyl ester
catgagcaagatttgcaactt

SEQ ID NO: 845 - RNA, 21 nt, synthetic construct
  source 1..21: mol_type = other RNA
  modified_base 1: mod_base = OTHER; note = 2'-O-methyladenosine-3'-phosphorothioate
  modified_base 2: mod_base = OTHER; note = 2'-O-methyluridine-3'-phosphorothioate
  modified_base 3: mod_base = OTHER; note = 2'-O-methylguanosine-3'-phosphate
  modified_base 4: mod_base = OTHER; note = 2'-O-methyladenosine-3'-phosphate
  modified_base 5: mod_base = OTHER; note = 2'-O-methylguanosine-3'-phosphate
  modified_base 6: mod_base = OTHER; note = 2'-O-methylcytidine-3'-phosphate
  modified_base 7: mod_base = OTHER; note = 2'-deoxy-2'-fluoroadenosine-3'-phosphate
  modified_base 8: mod_base = OTHER; note = 2'-O-methyladenosine-3'-phosphate
  modified_base 9: mod_base = OTHER; note = 2'-deoxy-2'-fluoroguanosine-3'-phosphate
  modified_base 10: mod_base = OTHER; note = 2'-deoxy-2'-fluoroadenosine-3'-phosphate
  modified_base 11: mod_base = OTHER; note = 2'-deoxy-2'-fluorouridine-3'-phosphate
  modified_base 12: mod_base = OTHER; note = 2'-O-methyluridine-3'-phosphate
  modified_base 13: mod_base = OTHER; note = 2'-O-methyluridine-3'-phosphate
  modified_base 14: mod_base = OTHER; note = 2'-O-methylguanosine-3'-phosphate
  modified_base 15: mod_base = OTHER; note = 2'-O-methylcytidine-3'-phosphate
  modified_base 16: mod_base = OTHER; note = 2'-O-methyladenosine-3'-phosphate
  modified_base 17: mod_base = OTHER; note = 2'-O-methyladenosine-3'-phosphate
  modified_base 18: mod_base = OTHER; note = 2'-O-methylcytidine-3'-phosphate
  modified_base 19: mod_base = OTHER; note = 2'-O-methyluridine-3'-phosphate
  modified_base 20: mod_base = OTHER; note = 2'-O-methyluridine-3'-phosphate
  modified_base 21: mod_base = OTHER; note = 2'-O-methyluridine-3'-phosphate ((2S,4R)-1-[29-[[2-(acetylamino)-2-deoxy-beta-D-galactopyra nosyl]oxy]-14,14-bis[[3-[[3-[[5-[[2-(acetylamino)-2-deoxy-b eta-D-galactopyranosyl]oxy]-1-oxopentyl]amino]propyl]amino] -3-oxopropoxy]methyl]-1,12,19,25-tetraoxo-16-oxa-13,20,24-t riazanonacos-1-yl]-4-hydroxy-2-pyrrolidinyl)methyl ester
atgagcaagatttgcaacttt

SEQ ID NO: 846 - RNA, 21 nt, synthetic construct
  source 1..21: mol_type = other RNA
  modified_base 1: mod_base = OTHER; note = 2'-O-methyluridine-3'-phosphorothioate
  modified_base 2: mod_base = OTHER; note = 2'-O-methyluridine-3'-phosphorothioate
  modified_base 3: mod_base = OTHER; note = 2'-O-methyluridine-3'-phosphate
  modified_base 4: mod_base = OTHER; note = 2'-O-methylguanosine-3'-phosphate
  modified_base 5: mod_base = OTHER; note = 2'-O-methylcytidine-3'-phosphate
  modified_base 6: mod_base = OTHER; note = 2'-O-methyladenosine-3'-phosphate
  modified_base 7: mod_base = OTHER; note = 2'-deoxy-2'-fluoroadenosine-3'-phosphate
  modified_base 8: mod_base = OTHER; note = 2'-O-methylcytidine-3'-phosphate
  modified_base 9: mod_base = OTHER; note = 2'-deoxy-2'-fluorouridine-3'-phosphate
  modified_base 10: mod_base = OTHER; note = 2'-deoxy-2'-fluorouridine-3'-phosphate
  modified_base 11: mod_base = OTHER; note = 2'-deoxy-2'-fluoroguanosine-3'-phosphate
  modified_base 12: mod_base = OTHER; note = 2'-O-methylcytidine-3'-phosphate
  modified_base 13: mod_base = OTHER; note = 2'-O-methyluridine-3'-phosphate
  modified_base 14: mod_base = OTHER; note = 2'-O-methyladenosine-3'-phosphate
  modified_base 15: mod_base = OTHER; note = 2'-O-methylcytidine-3'-phosphate
  modified_base 16: mod_base = OTHER; note = 2'-O-methylcytidine-3'-phosphate
  modified_base 17: mod_base = OTHER; note = 2'-O-methylcytidine-3'-phosphate
  modified_base 18: mod_base = OTHER; note = 2'-O-methyladenosine-3'-phosphate
  modified_base 19: mod_base = OTHER; note = 2'-O-methyluridine-3'-phosphate
  modified_base 20: mod_base = OTHER; note = 2'-O-methyluridine-3'-phosphate
  modified_base 21: mod_base = OTHER; note = 2'-O-methyluridine-3'-phosphate ((2S,4R)-1-[29-[[2-(acetylamino)-2-deoxy-beta-D-galactopyra nosyl]oxy]-14,14-bis[[3-[[3-[[5-[[2-(acetylamino)-2-deoxy-b eta-D-galactopyranosyl]oxy]-1-oxopentyl]amino]propyl]amino] -3-oxopropoxy]methyl]-1,12,19,25-tetraoxo-16-oxa-13,20,24-t riazanonacos-1-yl]-4-hydroxy-2-pyrrolidinyl)methyl ester
tttgcaacttgctacccattt

SEQ ID NO: 847 - RNA, 21 nt, synthetic construct
  source 1..21: mol_type = other RNA
  modified_base 1: mod_base = OTHER; note = 2'-O-methyladenosine-3'-phosphorothioate
  modified_base 2: mod_base = OTHER; note = 2'-O-methyluridine-3'-phosphorothioate
  modified_base 3: mod_base = OTHER; note = 2'-O-methylguanosine-3'-phosphate
  modified_base 4: mod_base = OTHER; note = 2'-O-methylcytidine-3'-phosphate
  modified_base 5: mod_base = OTHER; note = 2'-O-methyluridine-3'-phosphate
  modified_base 6: mod_base = OTHER; note = 2'-O-methylguanosine-3'-phosphate
  modified_base 7: mod_base = OTHER; note = 2'-deoxy-2'-fluorocytidine-3'-phosphate
  modified_base 8: mod_base = OTHER; note = 2'-O-methylcytidine-3'-phosphate
  modified_base 9: mod_base = OTHER; note = 2'-deoxy-2'-fluorocytidine-3'-phosphate
  modified_base 10: mod_base = OTHER; note = 2'-deoxy-2'-fluorouridine-3'-phosphate
  modified_base 11: mod_base = OTHER; note = 2'-deoxy-2'-fluoroguanosine-3'-phosphate
  modified_base 12: mod_base = OTHER; note = 2'-O-methyluridine-3'-phosphate
  modified_base 13: mod_base = OTHER; note = 2'-O-methyladenosine-3'-phosphate
  modified_base 14: mod_base = OTHER; note = 2'-O-methylcytidine-3'-phosphate
  modified_base 15: mod_base = OTHER; note = 2'-O-methylcytidine-3'-phosphate
  modified_base 16: mod_base = OTHER; note = 2'-O-methylcytidine-3'-phosphate
  modified_base 17: mod_base = OTHER; note = 2'-O-methyluridine-3'-phosphate
  modified_base 18: mod_base = OTHER; note = 2'-O-methylguanosine-3'-phosphate
  modified_base 19: mod_base = OTHER; note = 2'-O-methylcytidine-3'-phosphate
  modified_base 20: mod_base = OTHER; note = 2'-O-methylcytidine-3'-phosphate
  modified_base 21: mod_base = OTHER; note = 2'-O-methyluridine-3'-phosphate ((2S,4R)-1-[29-[[2-(acetylamino)-2-deoxy-beta-D-galactopyra nosyl]oxy]-14,14-bis[[3-[[3-[[5-[[2-(acetylamino)-2-deoxy-b eta-D-galactopyranosyl]oxy]-1-oxopentyl]amino]propyl]amino] -3-oxopropoxy]methyl]-1,12,19,25-tetraoxo-16-oxa-13,20,24-t riazanonacos-1-yl]-4-hydroxy-2-pyrrolidinyl)methyl ester
atgctgccctgtaccctgcct

SEQ ID NO: 848 - RNA, 21 nt, synthetic construct
  source 1..21: mol_type = other RNA
  modified_base 1: mod_base = OTHER; note = 2'-O-methylguanosine-3'-phosphorothioate
  modified_base 2: mod_base = OTHER; note = 2'-O-methylcytidine-3'-phosphorothioate
  modified_base 3: mod_base = OTHER; note = 2'-O-methylcytidine-3'-phosphate
  modified_base 4: mod_base = OTHER; note = 2'-O-methyladenosine-3'-phosphate
  modified_base 5: mod_base = OTHER; note = 2'-O-methyluridine-3'-phosphate
  modified_base 6: mod_base = OTHER; note = 2'-O-methyluridine-3'-phosphate
  modified_base 7: mod_base = OTHER; note = 2'-deoxy-2'-fluoroguanosine-3'-phosphate
  modified_base 8: mod_base = OTHER; note = 2'-O-methylcytidine-3'-phosphate
  modified_base 9: mod_base = OTHER; note = 2'-deoxy-2'-fluoroguanosine-3'-phosphate
  modified_base 10: mod_base = OTHER; note = 2'-deoxy-2'-fluoroadenosine-3'-phosphate
  modified_base 11: mod_base = OTHER; note = 2'-deoxy-2'-fluorouridine-3'-phosphate
  modified_base 12: mod_base = OTHER; note = 2'-O-methyluridine-3'-phosphate
  modified_base 13: mod_base = OTHER; note = 2'-O-methylguanosine-3'-phosphate
  modified_base 14: mod_base = OTHER; note = 2'-O-methyluridine-3'-phosphate
  modified_base 15: mod_base = OTHER; note = 2'-O-methylcytidine-3'-phosphate
  modified_base 16: mod_base = OTHER; note = 2'-O-methylcytidine-3'-phosphate
  modified_base 17: mod_base = OTHER; note = 2'-O-methyladenosine-3'-phosphate
  modified_base 18: mod_base = OTHER; note = 2'-O-methylguanosine-3'-phosphate
  modified_base 19: mod_base = OTHER; note = 2'-O-methyladenosine-3'-phosphate
  modified_base 20: mod_base = OTHER; note = 2'-O-methylguanosine-3'-phosphate
  modified_base 21: mod_base = OTHER; note = 2'-O-methyluridine-3'-phosphate ((2S,4R)-1-[29-[[2-(acetylamino)-2-deoxy-beta-D-galactopyra nosyl]oxy]-14,14-bis[[3-[[3-[[5-[[2-(acetylamino)-2-deoxy-b eta-D-galactopyranosyl]oxy]-1-oxopentyl]amino]propyl]amino] -3-oxopropoxy]methyl]-1,12,19,25-tetraoxo-16-oxa-13,20,24-t riazanonacos-1-yl]-4-hydroxy-2-pyrrolidinyl)methyl ester
gccattgcgattgtccagagt

SEQ ID NO: 849 - RNA, 21 nt, synthetic construct
  source 1..21: mol_type = other RNA
  modified_base 1: mod_base = OTHER; note = 2'-O-methylcytidine-3'-phosphorothioate
  modified_base 2: mod_base = OTHER; note = 2'-O-methylcytidine-3'-phosphorothioate
  modified_base 3: mod_base = OTHER; note = 2'-O-methyladenosine-3'-phosphate
  modified_base 4: mod_base = OTHER; note = 2'-O-methyluridine-3'-phosphate
  modified_base 5: mod_base = OTHER; note = 2'-O-methyluridine-3'-phosphate
  modified_base 6: mod_base = OTHER; note = 2'-O-methylguanosine-3'-phosphate
  modified_base 7: mod_base = OTHER; note = 2'-deoxy-2'-fluorocytidine-3'-phosphate
  modified_base 8: mod_base = OTHER; note = 2'-O-methylguanosine-3'-phosphate
  modified_base 9: mod_base = OTHER; note = 2'-deoxy-2'-fluoroadenosine-3'-phosphate
  modified_base 10: mod_base = OTHER; note = 2'-deoxy-2'-fluorouridine-3'-phosphate
  modified_base 11: mod_base = OTHER; note = 2'-deoxy-2'-fluorouridine-3'-phosphate
  modified_base 12: mod_base = OTHER; note = 2'-O-methylguanosine-3'-phosphate
  modified_base 13: mod_base = OTHER; note = 2'-O-methyluridine-3'-phosphate
  modified_base 14: mod_base = OTHER; note = 2'-O-methylcytidine-3'-phosphate
  modified_base 15: mod_base = OTHER; note = 2'-O-methylcytidine-3'-phosphate
  modified_base 16: mod_base = OTHER; note = 2'-O-methyladenosine-3'-phosphate
  modified_base 17: mod_base = OTHER; note = 2'-O-methylguanosine-3'-phosphate
  modified_base 18: mod_base = OTHER; note = 2'-O-methyladenosine-3'-phosphate
  modified_base 19: mod_base = OTHER; note = 2'-O-methylguanosine-3'-phosphate
  modified_base 20: mod_base = OTHER; note = 2'-O-methyladenosine-3'-phosphate
  modified_base 21: mod_base = OTHER; note = 2'-O-methyluridine-3'-phosphate ((2S,4R)-1-[29-[[2-(acetylamino)-2-deoxy-beta-D-galactopyra nosyl]oxy]-14,14-bis[[3-[[3-[[5-[[2-(acetylamino)-2-deoxy-b eta-D-galactopyranosyl]oxy]-1-oxopentyl]amino]propyl]amino] -3-oxopropoxy]methyl]-1,12,19,25-tetraoxo-16-oxa-13,20,24-t riazanonacos-1-yl]-4-hydroxy-2-pyrrolidinyl)methyl ester
ccattgcgattgtccagagat

SEQ ID NO: 850 - RNA, 21 nt, synthetic construct
  source 1..21: mol_type = other RNA
  modified_base 1: mod_base = OTHER; note = 2'-O-methyladenosine-3'-phosphorothioate
  modified_base 2: mod_base = OTHER; note = 2'-O-methyluridine-3'-phosphorothioate
  modified_base 3: mod_base = OTHER; note = 2'-O-methyluridine-3'-phosphate
  modified_base 4: mod_base = OTHER; note = 2'-O-methylguanosine-3'-phosphate
  modified_base 5: mod_base = OTHER; note = 2'-O-methylcytidine-3'-phosphate
  modified_base 6: mod_base = OTHER; note = 2'-O-methylguanosine-3'-phosphate
  modified_base 7: mod_base = OTHER; note = 2'-deoxy-2'-fluoroadenosine-3'-phosphate
  modified_base 8: mod_base = OTHER; note = 2'-O-methyluridine-3'-phosphate
  modified_base 9: mod_base = OTHER; note = 2'-deoxy-2'-fluorouridine-3'-phosphate
  modified_base 10: mod_base = OTHER; note = 2'-deoxy-2'-fluoroguanosine-3'-phosphate
  modified_base 11: mod_base = OTHER; note = 2'-deoxy-2'-fluorouridine-3'-phosphate
  modified_base 12: mod_base = OTHER; note = 2'-O-methylcytidine-3'-phosphate
  modified_base 13: mod_base = OTHER; note = 2'-O-methylcytidine-3'-phosphate
  modified_base 14: mod_base = OTHER; note = 2'-O-methyladenosine-3'-phosphate
  modified_base 15: mod_base = OTHER; note = 2'-O-methylguanosine-3'-phosphate
  modified_base 16: mod_base = OTHER; note = 2'-O-methyladenosine-3'-phosphate
  modified_base 17: mod_base = OTHER; note = 2'-O-methylguanosine-3'-phosphate
  modified_base 18: mod_base = OTHER; note = 2'-O-methyladenosine-3'-phosphate
  modified_base 19: mod_base = OTHER; note = 2'-O-methylcytidine-3'-phosphate
  modified_base 20: mod_base = OTHER; note = 2'-O-methyluridine-3'-phosphate
  modified_base 21: mod_base = OTHER; note = 2'-O-methyluridine-3'-phosphate ((2S,4R)-1-[29-[[2-(acetylamino)-2-deoxy-beta-D-galactopyra nosyl]oxy]-14,14-bis[[3-[[3-[[5-[[2-(acetylamino)-2-deoxy-b eta-D-galactopyranosyl]oxy]-1-oxopentyl]amino]propyl]amino] -3-oxopropoxy]methyl]-1,12,19,25-tetraoxo-16-oxa-13,20,24-t riazanonacos-1-yl]-4-hydroxy-2-pyrrolidinyl)methyl ester
attgcgattgtccagagactt

SEQ ID NO: 851 - RNA, 21 nt, synthetic construct
  source 1..21: mol_type = other RNA
  modified_base 1: mod_base = OTHER; note = 2'-O-methylcytidine-3'-phosphorothioate
  modified_base 2: mod_base = OTHER; note = 2'-O-methylcytidine-3'-phosphorothioate
  modified_base 3: mod_base = OTHER; note = 2'-O-methyladenosine-3'-phosphate
  modified_base 4: mod_base = OTHER; note = 2'-O-methylguanosine-3'-phosphate
  modified_base 5: mod_base = OTHER; note = 2'-O-methyladenosine-3'-phosphate
  modified_base 6: mod_base = OTHER; note = 2'-O-methylguanosine-3'-phosphate
  modified_base 7: mod_base = OTHER; note = 2'-deoxy-2'-fluoroadenosine-3'-phosphate
  modified_base 8: mod_base = OTHER; note = 2'-O-methylcytidine-3'-phosphate
  modified_base 9: mod_base = OTHER; note = 2'-deoxy-2'-fluorouridine-3'-phosphate
  modified_base 10: mod_base = OTHER; note = 2'-deoxy-2'-fluoroguanosine-3'-phosphate
  modified_base 11: mod_base = OTHER; note = 2'-deoxy-2'-fluoroguanosine-3'-phosphate
  modified_base 12: mod_base = OTHER; note = 2'-O-methyluridine-3'-phosphate
  modified_base 13: mod_base = OTHER; note = 2'-O-methylguanosine-3'-phosphate
  modified_base 14: mod_base = OTHER; note = 2'-O-methyladenosine-3'-phosphate
  modified_base 15: mod_base = OTHER; note = 2'-O-methylcytidine-3'-phosphate
  modified_base 16: mod_base = OTHER; note = 2'-O-methyladenosine-3'-phosphate
  modified_base 17: mod_base = OTHER; note = 2'-O-methyluridine-3'-phosphate
  modified_base 18: mod_base = OTHER; note = 2'-O-methylguanosine-3'-phosphate
  modified_base 19: mod_base = OTHER; note = 2'-O-methylguanosine-3'-phosphate
  modified_base 20: mod_base = OTHER; note = 2'-O-methylcytidine-3'-phosphate
  modified_base 21: mod_base = OTHER; note = 2'-O-methyluridine-3'-phosphate ((2S,4R)-1-[29-[[2-(acetylamino)-2-deoxy-beta-D-galactopyra nosyl]oxy]-14,14-bis[[3-[[3-[[5-[[2-(acetylamino)-2-deoxy-b eta-D-galactopyranosyl]oxy]-1-oxopentyl]amino]propyl]amino] -3-oxopropoxy]methyl]-1,12,19,25-tetraoxo-16-oxa-13,20,24-t riazanonacos-1-yl]-4-hydroxy-2-pyrrolidinyl)methyl ester
ccagagactggtgacatggct

SEQ ID NO: 852 - RNA, 21 nt, synthetic construct
  source 1..21: mol_type = other RNA
  modified_base 1: mod_base = OTHER; note = 2'-O-methylguanosine-3'-phosphorothioate
  modified_base 2: mod_base = OTHER; note = 2'-O-methyladenosine-3'-phosphorothioate
  modified_base 3: mod_base = OTHER; note = 2'-O-methylcytidine-3'-phosphate
  modified_base 4: mod_base = OTHER; note = 2'-O-methyluridine-3'-phosphate
  modified_base 5: mod_base = OTHER; note = 2'-O-methylguanosine-3'-phosphate
  modified_base 6: mod_base = OTHER; note = 2'-O-methylguanosine-3'-phosphate
  modified_base 7: mod_base = OTHER; note = 2'-deoxy-2'-fluorouridine-3'-phosphate
  modified_base 8: mod_base = OTHER; note = 2'-O-methylguanosine-3'-phosphate
  modified_base 9: mod_base = OTHER; note = 2'-deoxy-2'-fluoroadenosine-3'-phosphate
  modified_base 10: mod_base = OTHER; note = 2'-deoxy-2'-fluorocytidine-3'-phosphate
  modified_base 11: mod_base = OTHER; note = 2'-deoxy-2'-fluoroadenosine-3'-phosphate
  modified_base 12: mod_base = OTHER; note = 2'-O-methyluridine-3'-phosphate
  modified_base 13: mod_base = OTHER; note = 2'-O-methylguanosine-3'-phosphate
  modified_base 14: mod_base = OTHER; note = 2'-O-methylguanosine-3'-phosphate
  modified_base 15: mod_base = OTHER; note = 2'-O-methylcytidine-3'-phosphate
  modified_base 16: mod_base = OTHER; note = 2'-O-methyluridine-3'-phosphate
  modified_base 17: mod_base = OTHER; note = 2'-O-methyluridine-3'-phosphate
  modified_base 18: mod_base = OTHER; note = 2'-O-methylcytidine-3'-phosphate
  modified_base 19: mod_base = OTHER; note = 2'-O-methylcytidine-3'-phosphate
  modified_base 20: mod_base = OTHER; note = 2'-O-methyladenosine-3'-phosphate
  modified_base 21: mod_base = OTHER; note = 2'-O-methyluridine-3'-phosphate ((2S,4R)-1-[29-[[2-(acetylamino)-2-deoxy-beta-D-galactopyra nosyl]oxy]-14,14-bis[[3-[[3-[[5-[[2-(acetylamino)-2-deoxy-b eta-D-galactopyranosyl]oxy]-1-oxopentyl]amino]propyl]amino] -3-oxopropoxy]methyl]-1,12,19,25-tetraoxo-16-oxa-13,20,24-t riazanonacos-1-yl]-4-hydroxy-2-pyrrolidinyl)methyl ester
gactggtgacatggcttccat

SEQ ID NO: 853 - RNA, 21 nt, synthetic construct
  source 1..21: mol_type = other RNA
  modified_base 1: mod_base = OTHER; note = 2'-O-methyluridine-3'-phosphorothioate
  modified_base 2: mod_base = OTHER; note = 2'-O-methylguanosine-3'-phosphorothioate
  modified_base 3: mod_base = OTHER; note = 2'-O-methylguanosine-3'-phosphate
  modified_base 4: mod_base = OTHER; note = 2'-O-methyluridine-3'-phosphate
  modified_base 5: mod_base = OTHER; note = 2'-O-methylguanosine-3'-phosphate
  modified_base 6: mod_base = OTHER; note = 2'-O-methyladenosine-3'-phosphate
  modified_base 7: mod_base = OTHER; note = 2'-deoxy-2'-fluorocytidine-3'-phosphate
  modified_base 8: mod_base = OTHER; note = 2'-O-methyladenosine-3'-phosphate
  modified_base 9: mod_base = OTHER; note = 2'-deoxy-2'-fluorouridine-3'-phosphate
  modified_base 10: mod_base = OTHER; note = 2'-deoxy-2'-fluoroguanosine-3'-phosphate
  modified_base 11: mod_base = OTHER; note = 2'-deoxy-2'-fluoroguanosine-3'-phosphate
  modified_base 12: mod_base = OTHER; note = 2'-O-methylcytidine-3'-phosphate
  modified_base 13: mod_base = OTHER; note = 2'-O-methyluridine-3'-phosphate
  modified_base 14: mod_base = OTHER; note = 2'-O-methyluridine-3'-phosphate
  modified_base 15: mod_base = OTHER; note = 2'-O-methylcytidine-3'-phosphate
  modified_base 16: mod_base = OTHER; note = 2'-O-methylcytidine-3'-phosphate
  modified_base 17: mod_base = OTHER; note = 2'-O-methyladenosine-3'-phosphate
  modified_base 18: mod_base = OTHER; note = 2'-O-methylguanosine-3'-phosphate
  modified_base 19: mod_base = OTHER; note = 2'-O-methyladenosine-3'-phosphate
  modified_base 20: mod_base = OTHER; note = 2'-O-methyluridine-3'-phosphate
  modified_base 21: mod_base = OTHER; note = 2'-O-methyluridine-3'-phosphate ((2S,4R)-1-[29-[[2-(acetylamino)-2-deoxy-beta-D-galactopyra nosyl]oxy]-14,14-bis[[3-[[3-[[5-[[2-(acetylamino)-2-deoxy-b eta-D-galactopyranosyl]oxy]-1-oxopentyl]amino]propyl]amino] -3-oxopropoxy]methyl]-1,12,19,25-tetraoxo-16-oxa-13,20,24-t riazanonacos-1-yl]-4-hydroxy-2-pyrrolidinyl)methyl ester
tggtgacatggcttccagatt

SEQ ID NO: 854 - RNA, 21 nt, synthetic construct
  source 1..21: mol_type = other RNA
  modified_base 1: mod_base = OTHER; note = 2'-O-methylguanosine-3'-phosphorothioate
  modified_base 2: mod_base = OTHER; note = 2'-O-methylguanosine-3'-phosphorothioate
  modified_base 3: mod_base = OTHER; note = 2'-O-methyluridine-3'-phosphate
  modified_base 4: mod_base = OTHER; note = 2'-O-methylguanosine-3'-phosphate
  modified_base 5: mod_base = OTHER; note = 2'-O-methyladenosine-3'-phosphate
  modified_base 6: mod_base = OTHER; note = 2'-O-methylcytidine-3'-phosphate
  modified_base 7: mod_base = OTHER; note = 2'-deoxy-2'-fluoroadenosine-3'-phosphate
  modified_base 8: mod_base = OTHER; note = 2'-O-methyluridine-3'-phosphate
  modified_base 9: mod_base = OTHER; note = 2'-deoxy-2'-fluoroguanosine-3'-phosphate
  modified_base 10: mod_base = OTHER; note = 2'-deoxy-2'-fluoroguanosine-3'-phosphate
  modified_base 11: mod_base = OTHER; note = 2'-deoxy-2'-fluorocytidine-3'-phosphate
  modified_base 12: mod_base = OTHER; note = 2'-O-methyluridine-3'-phosphate
  modified_base 13: mod_base = OTHER; note = 2'-O-methyluridine-3'-phosphate
  modified_base 14: mod_base = OTHER; note = 2'-O-methylcytidine-3'-phosphate
  modified_base 15: mod_base = OTHER; note = 2'-O-methylcytidine-3'-phosphate
  modified_base 16: mod_base = OTHER; note = 2'-O-methyladenosine-3'-phosphate
  modified_base 17: mod_base = OTHER; note = 2'-O-methylguanosine-3'-phosphate
  modified_base 18: mod_base = OTHER; note = 2'-O-methyladenosine-3'-phosphate
  modified_base 19: mod_base = OTHER; note = 2'-O-methyluridine-3'-phosphate
  modified_base 20: mod_base = OTHER; note = 2'-O-methyladenosine-3'-phosphate
  modified_base 21: mod_base = OTHER; note = 2'-O-methyluridine-3'-phosphate ((2S,4R)-1-[29-[[2-(acetylamino)-2-deoxy-beta-D-galactopyra nosyl]oxy]-14,14-bis[[3-[[3-[[5-[[2-(acetylamino)-2-deoxy-b eta-D-galactopyranosyl]oxy]-1-oxopentyl]amino]propyl]amino] -3-oxopropoxy]methyl]-1,12,19,25-tetraoxo-16-oxa-13,20,24-t riazanonacos-1-yl]-4-hydroxy-2-pyrrolidinyl)methyl ester
ggtgacatggcttccagatat

SEQ ID NO: 855 - RNA, 21 nt, synthetic construct
  source 1..21: mol_type = other RNA
  modified_base 1: mod_base = OTHER; note = 2'-O-methyluridine-3'-phosphorothioate
  modified_base 2: mod_base = OTHER; note = 2'-O-methylguanosine-3'-phosphorothioate
  modified_base 3: mod_base = OTHER; note = 2'-O-methylguanosine-3'-phosphate
  modified_base 4: mod_base = OTHER; note = 2'-O-methylcytidine-3'-phosphate
  modified_base 5: mod_base = OTHER; note = 2'-O-methyluridine-3'-phosphate
  modified_base 6: mod_base = OTHER; note = 2'-O-methyluridine-3'-phosphate
  modified_base 7: mod_base = OTHER; note = 2'-deoxy-2'-fluorocytidine-3'-phosphate
  modified_base 8: mod_base = OTHER; note = 2'-O-methylcytidine-3'-phosphate
  modified_base 9: mod_base = OTHER; note = 2'-deoxy-2'-fluoroadenosine-3'-phosphate
  modified_base 10: mod_base = OTHER; note = 2'-deoxy-2'-fluoroguanosine-3'-phosphate
  modified_base 11: mod_base = OTHER; note = 2'-deoxy-2'-fluoroadenosine-3'-phosphate
  modified_base 12: mod_base = OTHER; note = 2'-O-methyluridine-3'-phosphate
  modified_base 13: mod_base = OTHER; note = 2'-O-methyladenosine-3'-phosphate
  modified_base 14: mod_base = OTHER; note = 2'-O-methyluridine-3'-phosphate
  modified_base 15: mod_base = OTHER; note = 2'-O-methylguanosine-3'-phosphate
  modified_base 16: mod_base = OTHER; note = 2'-O-methylcytidine-3'-phosphate
  modified_base 17: mod_base = OTHER; note = 2'-O-methylcytidine-3'-phosphate
  modified_base 18: mod_base = OTHER; note = 2'-O-methylcytidine-3'-phosphate
  modified_base 19: mod_base = OTHER; note = 2'-O-methylguanosine-3'-phosphate
  modified_base 20: mod_base = OTHER; note = 2'-O-methyladenosine-3'-phosphate
  modified_base 21: mod_base = OTHER; note = 2'-O-methyluridine-3'-phosphate ((2S,4R)-1-[29-[[2-(acetylamino)-2-deoxy-beta-D-galactopyra nosyl]oxy]-14,14-bis[[3-[[3-[[5-[[2-(acetylamino)-2-deoxy-b eta-D-galactopyranosyl]oxy]-1-oxopentyl]amino]propyl]amino] -3-oxopropoxy]methyl]-1,12,19,25-tetraoxo-16-oxa-13,20,24-t riazanonacos-1-yl]-4-hydroxy-2-pyrrolidinyl)methyl ester
tggcttccagatatgcccgat

SEQ ID NO: 856 - RNA, 21 nt, synthetic construct
  source 1..21: mol_type = other RNA
  modified_base 1: mod_base = OTHER; note = 2'-O-methylguanosine-3'-phosphorothioate
  modified_base 2: mod_base = OTHER; note = 2'-O-methylguanosine-3'-phosphorothioate
  modified_base 3: mod_base = OTHER; note = 2'-O-methylcytidine-3'-phosphate
  modified_base 4: mod_base = OTHER; note = 2'-O-methyluridine-3'-phosphate
  modified_base 5: mod_base = OTHER; note = 2'-O-methyluridine-3'-phosphate
  modified_base 6: mod_base = OTHER; note = 2'-O-methylcytidine-3'-phosphate
  modified_base 7: mod_base = OTHER; note = 2'-deoxy-2'-fluorocytidine-3'-phosphate
  modified_base 8: mod_base = OTHER; note = 2'-O-methyladenosine-3'-phosphate
  modified_base 9: mod_base = OTHER; note = 2'-deoxy-2'-fluoroguanosine-3'-phosphate
  modified_base 10: mod_base = OTHER; note = 2'-deoxy-2'-fluoroadenosine-3'-phosphate
  modified_base 11: mod_base = OTHER; note = 2'-deoxy-2'-fluorouridine-3'-phosphate
  modified_base 12: mod_base = OTHER; note = 2'-O-methyladenosine-3'-phosphate
  modified_base 13: mod_base = OTHER; note = 2'-O-methyluridine-3'-phosphate
  modified_base 14: mod_base = OTHER; note = 2'-O-methylguanosine-3'-phosphate
  modified_base 15: mod_base = OTHER; note = 2'-O-methylcytidine-3'-phosphate
  modified_base 16: mod_base = OTHER; note = 2'-O-methylcytidine-3'-phosphate
  modified_base 17: mod_base = OTHER; note = 2'-O-methylcytidine-3'-phosphate
  modified_base 18: mod_base = OTHER; note = 2'-O-methylguanosine-3'-phosphate
  modified_base 19: mod_base = OTHER; note = 2'-O-methyladenosine-3'-phosphate
  modified_base 20: mod_base = OTHER; note = 2'-O-methylcytidine-3'-phosphate
  modified_base 21: mod_base = OTHER; note = 2'-O-methyluridine-3'-phosphate ((2S,4R)-1-[29-[[2-(acetylamino)-2-deoxy-beta-D-galactopyra nosyl]oxy]-14,14-bis[[3-[[3-[[5-[[2-(acetylamino)-2-deoxy-b eta-D-galactopyranosyl]oxy]-1-oxopentyl]amino]propyl]amino] -3-oxopropoxy]methyl]-1,12,19,25-tetraoxo-16-oxa-13,20,24-t riazanonacos-1-yl]-4-hydroxy-2-pyrrolidinyl)methyl ester
ggcttccagatatgcccgact

SEQ ID NO: 857 - RNA, 21 nt, synthetic construct
  source 1..21: mol_type = other RNA
  modified_base 1: mod_base = OTHER; note = 2'-O-methylguanosine-3'-phosphorothioate
  modified_base 2: mod_base = OTHER; note = 2'-O-methyluridine-3'-phosphorothioate
  modified_base 3: mod_base = OTHER; note = 2'-O-methyluridine-3'-phosphate
  modified_base 4: mod_base = OTHER; note = 2'-O-methylguanosine-3'-phosphate
  modified_base 5: mod_base = OTHER; note = 2'-O-methylcytidine-3'-phosphate
  modified_base 6: mod_base = OTHER; note = 2'-O-methyladenosine-3'-phosphate
  modified_base 7: mod_base = OTHER; note = 2'-deoxy-2'-fluoroguanosine-3'-phosphate
  modified_base 8: mod_base = OTHER; note = 2'-O-methyluridine-3'-phosphate
  modified_base 9: mod_base = OTHER; note = 2'-deoxy-2'-fluoroguanosine-3'-phosphate
  modified_base 10: mod_base = OTHER; note = 2'-deoxy-2'-fluoroguanosine-3'-phosphate
  modified_base 11: mod_base = OTHER; note = 2'-deoxy-2'-fluoroguanosine-3'-phosphate
  modified_base 12: mod_base = OTHER; note = 2'-O-methyluridine-3'-phosphate
  modified_base 13: mod_base = OTHER; note = 2'-O-methylguanosine-3'-phosphate
  modified_base 14: mod_base = OTHER; note = 2'-O-methyladenosine-3'-phosphate
  modified_base 15: mod_base = OTHER; note = 2'-O-methylcytidine-3'-phosphate
  modified_base 16: mod_base = OTHER; note = 2'-O-methylcytidine-3'-phosphate
  modified_base 17: mod_base = OTHER; note = 2'-O-methyluridine-3'-phosphate
  modified_base 18: mod_base = OTHER; note = 2'-O-methylcytidine-3'-phosphate
  modified_base 19: mod_base = OTHER; note = 2'-O-methyladenosine-3'-phosphate
  modified_base 20: mod_base = OTHER; note = 2'-O-methylcytidine-3'-phosphate
  modified_base 21: mod_base = OTHER; note = 2'-O-methyluridine-3'-phosphate ((2S,4R)-1-[29-[[2-(acetylamino)-2-deoxy-beta-D-galactopyra nosyl]oxy]-14,14-bis[[3-[[3-[[5-[[2-(acetylamino)-2-deoxy-b eta-D-galactopyranosyl]oxy]-1-oxopentyl]amino]propyl]amino] -3-oxopropoxy]methyl]-1,12,19,25-tetraoxo-16-oxa-13,20,24-t riazanonacos-1-yl]-4-hydroxy-2-pyrrolidinyl)methyl ester
gttgcagtgggtgacctcact

SEQ ID NO: 858 - RNA, 21 nt, synthetic construct
  source 1..21: mol_type = other RNA
  modified_base 1: mod_base = OTHER; note = 2'-O-methylcytidine-3'-phosphorothioate
  modified_base 2: mod_base = OTHER; note = 2'-O-methylcytidine-3'-phosphorothioate
  modified_base 3: mod_base = OTHER; note = 2'-O-methyladenosine-3'-phosphate
  modified_base 4: mod_base = OTHER; note = 2'-O-methylguanosine-3'-phosphate
  modified_base 5: mod_base = OTHER; note = 2'-O-methylguanosine-3'-phosphate
  modified_base 6: mod_base = OTHER; note = 2'-O-methyluridine-3'-phosphate
  modified_base 7: mod_base = OTHER; note = 2'-deoxy-2'-fluorocytidine-3'-phosphate
  modified_base 8: mod_base = OTHER; note = 2'-O-methylcytidine-3'-phosphate
  modified_base 9: mod_base = OTHER; note = 2'-deoxy-2'-fluorocytidine-3'-phosphate
  modified_base 10: mod_base = OTHER; note = 2'-deoxy-2'-fluoroadenosine-3'-phosphate
  modified_base 11: mod_base = OTHER; note = 2'-deoxy-2'-fluoroadenosine-3'-phosphate
  modified_base 12: mod_base = OTHER; note = 2'-O-methyladenosine-3'-phosphate
  modified_base 13: mod_base = OTHER; note = 2'-O-methyluridine-3'-phosphate
  modified_base 14: mod_base = OTHER; note = 2'-O-methylguanosine-3'-phosphate
  modified_base 15: mod_base = OTHER; note = 2'-O-methylcytidine-3'-phosphate
  modified_base 16: mod_base = OTHER; note = 2'-O-methylcytidine-3'-phosphate
  modified_base 17: mod_base = OTHER; note = 2'-O-methyladenosine-3'-phosphate
  modified_base 18: mod_base = OTHER; note = 2'-O-methylguanosine-3'-phosphate
  modified_base 19: mod_base = OTHER; note = 2'-O-methyluridine-3'-phosphate
  modified_base 20: mod_base = OTHER; note = 2'-O-methylguanosine-3'-phosphate
  modified_base 21: mod_base = OTHER; note = 2'-O-methyluridine-3'-phosphate ((2S,4R)-1-[29-[[2-(acetylamino)-2-deoxy-beta-D-galactopyra nosyl]oxy]-14,14-bis[[3-[[3-[[5-[[2-(acetylamino)-2-deoxy-b eta-D-galactopyranosyl]oxy]-1-oxopentyl]amino]propyl]amino] -3-oxopropoxy]methyl]-1,12,19,25-tetraoxo-16-oxa-13,20,24-t riazanonacos-1-yl]-4-hydroxy-2-pyrrolidinyl)methyl ester
ccaggtcccaaatgccagtgt

SEQ ID NO: 859 - RNA, 21 nt, synthetic construct
  source 1..21: mol_type = other RNA
  modified_base 1: mod_base = OTHER; note = 2'-O-methylguanosine-3'-phosphorothioate
  modified_base 2: mod_base = OTHER; note = 2'-O-methylcytidine-3'-phosphorothioate
  modified_base 3: mod_base = OTHER; note = 2'-O-methyluridine-3'-phosphate
  modified_base 4: mod_base = OTHER; note = 2'-O-methylcytidine-3'-phosphate
  modified_base 5: mod_base = OTHER; note = 2'-O-methyluridine-3'-phosphate
  modified_base 6: mod_base = OTHER; note = 2'-O-methylcytidine-3'-phosphate
  modified_base 7: mod_base = OTHER; note = 2'-deoxy-2'-fluorocytidine-3'-phosphate
  modified_base 8: mod_base = OTHER; note = 2'-O-methyladenosine-3'-phosphate
  modified_base 9: mod_base = OTHER; note = 2'-deoxy-2'-fluorocytidine-3'-phosphate
  modified_base 10: mod_base = OTHER; note = 2'-deoxy-2'-fluorocytidine-3'-phosphate
  modified_base 11: mod_base = OTHER; note = 2'-deoxy-2'-fluorouridine-3'-phosphate
  modified_base 12: mod_base = OTHER; note = 2'-O-methyluridine-3'-phosphate
  modified_base 13: mod_base = OTHER; note = 2'-O-methyluridine-3'-phosphate
  modified_base 14: mod_base = OTHER; note = 2'-O-methylcytidine-3'-phosphate
  modified_base 15: mod_base = OTHER; note = 2'-O-methylcytidine-3'-phosphate
  modified_base 16: mod_base = OTHER; note = 2'-O-methylcytidine-3'-phosphate
  modified_base 17: mod_base = OTHER; note = 2'-O-methyladenosine-3'-phosphate
  modified_base 18: mod_base = OTHER; note = 2'-O-methylguanosine-3'-phosphate
  modified_base 19: mod_base = OTHER; note = 2'-O-methyluridine-3'-phosphate
  modified_base 20: mod_base = OTHER; note = 2'-O-methyluridine-3'-phosphate
  modified_base 21: mod_base = OTHER; note = 2'-O-methyluridine-3'-phosphate ((2S,4R)-1-[29-[[2-(acetylamino)-2-deoxy-beta-D-galactopyra nosyl]oxy]-14,14-bis[[3-[[3-[[5-[[2-(acetylamino)-2-deoxy-b eta-D-galactopyranosyl]oxy]-1-oxopentyl]amino]propyl]amino] -3-oxopropoxy]methyl]-1,12,19,25-tetraoxo-16-oxa-13,20,24-t riazanonacos-1-yl]-4-hydroxy-2-pyrrolidinyl)methyl ester
gctctccacctttcccagttt

SEQ ID NO: 860 - RNA, 21 nt, synthetic construct
  source 1..21: mol_type = other RNA
  modified_base 1: mod_base = OTHER; note = 2'-O-methyladenosine-3'-phosphorothioate
  modified_base 2: mod_base = OTHER; note = 2'-O-methyluridine-3'-phosphorothioate
  modified_base 3: mod_base = OTHER; note = 2'-O-methyluridine-3'-phosphate
  modified_base 4: mod_base = OTHER; note = 2'-O-methylcytidine-3'-phosphate
  modified_base 5: mod_base = OTHER; note = 2'-O-methyluridine-3'-phosphate
  modified_base 6: mod_base = OTHER; note = 2'-O-methyluridine-3'-phosphate
  modified_base 7: mod_base = OTHER; note = 2'-deoxy-2'-fluorouridine-3'-phosphate
  modified_base 8: mod_base = OTHER; note = 2'-O-methylcytidine-3'-phosphate
  modified_base 9: mod_base = OTHER; note = 2'-deoxy-2'-fluoroadenosine-3'-phosphate
  modified_base 10: mod_base = OTHER; note = 2'-deoxy-2'-fluoroguanosine-3'-phosphate
  modified_base 11: mod_base = OTHER; note = 2'-deoxy-2'-fluoroadenosine-3'-phosphate
  modified_base 12: mod_base = OTHER; note = 2'-O-methylguanosine-3'-phosphate
  modified_base 13: mod_base = OTHER; note = 2'-O-methylguanosine-3'-phosphate
  modified_base 14: mod_base = OTHER; note = 2'-O-methyluridine-3'-phosphate
  modified_base 15: mod_base = OTHER; note = 2'-O-methylguanosine-3'-phosphate
  modified_base 16: mod_base = OTHER; note = 2'-O-methylcytidine-3'-phosphate
  modified_base 17: mod_base = OTHER; note = 2'-O-methyluridine-3'-phosphate
  modified_base 18: mod_base = OTHER; note = 2'-O-methyladenosine-3'-phosphate
  modified_base 19: mod_base = OTHER; note = 2'-O-methyladenosine-3'-phosphate
  modified_base 20: mod_base = OTHER; note = 2'-O-methyladenosine-3'-phosphate
  modified_base 21: mod_base = OTHER; note = 2'-O-methyluridine-3'-phosphate ((2S,4R)-1-[29-[[2-(acetylamino)-2-deoxy-beta-D-galactopyra nosyl]oxy]-14,14-bis[[3-[[3-[[5-[[2-(acetylamino)-2-deoxy-b eta-D-galactopyranosyl]oxy]-1-oxopentyl]amino]propyl]amino] -3-oxopropoxy]methyl]-1,12,19,25-tetraoxo-16-oxa-13,20,24-t riazanonacos-1-yl]-4-hydroxy-2-pyrrolidinyl)methyl ester
attctttcagaggtgctaaat

SEQ ID NO: 861 - RNA, 21 nt, synthetic construct
  source 1..21: mol_type = other RNA
  modified_base 1: mod_base = OTHER; note = 2'-O-methyluridine-3'-phosphorothioate
  modified_base 2: mod_base = OTHER; note = 2'-O-methyluridine-3'-phosphorothioate
  modified_base 3: mod_base = OTHER; note = 2'-O-methylcytidine-3'-phosphate
  modified_base 4: mod_base = OTHER; note = 2'-O-methylcytidine-3'-phosphate
  modified_base 5: mod_base = OTHER; note = 2'-O-methylcytidine-3'-phosphate
  modified_base 6: mod_base = OTHER; note = 2'-O-methyladenosine-3'-phosphate
  modified_base 7: mod_base = OTHER; note = 2'-deoxy-2'-fluorouridine-3'-phosphate
  modified_base 8: mod_base = OTHER; note = 2'-O-methylcytidine-3'-phosphate
  modified_base 9: mod_base = OTHER; note = 2'-deoxy-2'-fluorouridine-3'-phosphate
  modified_base 10: mod_base = OTHER; note = 2'-deoxy-2'-fluorouridine-3'-phosphate
  modified_base 11: mod_base = OTHER; note = 2'-deoxy-2'-fluorouridine-3'-phosphate
  modified_base 12: mod_base = OTHER; note = 2'-O-methylguanosine-3'-phosphate
  modified_base 13: mod_base = OTHER; note = 2'-O-methyluridine-3'-phosphate
  modified_base 14: mod_base = OTHER; note = 2'-O-methylguanosine-3'-phosphate
  modified_base 15: mod_base = OTHER; note = 2'-O-methylcytidine-3'-phosphate
  modified_base 16: mod_base = OTHER; note = 2'-O-methyladenosine-3'-phosphate
  modified_base 17: mod_base = OTHER; note = 2'-O-methylguanosine-3'-phosphate
  modified_base 18: mod_base = OTHER; note = 2'-O-methylcytidine-3'-phosphate
  modified_base 19: mod_base = OTHER; note = 2'-O-methyluridine-3'-phosphate
  modified_base 20: mod_base = OTHER; note = 2'-O-methyladenosine-3'-phosphate
  modified_base 21: mod_base = OTHER; note = 2'-O-methyluridine-3'-phosphate ((2S,4R)-1-[29-[[2-(acetylamino)-2-deoxy-beta-D-galactopyra nosyl]oxy]-14,14-bis[[3-[[3-[[5-[[2-(acetylamino)-2-deoxy-b eta-D-galactopyranosyl]oxy]-1-oxopentyl]amino]propyl]amino] -3-oxopropoxy]methyl]-1,12,19,25-tetraoxo-16-oxa-13,20,24-t riazanonacos-1-yl]-4-hydroxy-2-pyrrolidinyl)methyl ester
ttcccatctttgtgcagctat

SEQ ID NO: 862 - RNA, 21 nt, synthetic construct
  source 1..21: mol_type = other RNA
  modified_base 1: mod_base = OTHER; note = 2'-O-methylguanosine-3'-phosphorothioate
  modified_base 2: mod_base = OTHER; note = 2'-O-methyladenosine-3'-phosphorothioate
  modified_base 3: mod_base = OTHER; note = 2'-O-methylcytidine-3'-phosphate
  modified_base 4: mod_base = OTHER; note = 2'-O-methylguanosine-3'-phosphate
  modified_base 5: mod_base = OTHER; note = 2'-O-methyluridine-3'-phosphate
  modified_base 6: mod_base = OTHER; note = 2'-O-methylguanosine-3'-phosphate
  modified_base 7: mod_base = OTHER; note = 2'-deoxy-2'-fluoroguanosine-3'-phosphate
  modified_base 8: mod_base = OTHER; note = 2'-O-methyladenosine-3'-phosphate
  modified_base 9: mod_base = OTHER; note = 2'-deoxy-2'-fluoroguanosine-3'-phosphate
  modified_base 10: mod_base = OTHER; note = 2'-deoxy-2'-fluoroguanosine-3'-phosphate
  modified_base 11: mod_base = OTHER; note = 2'-deoxy-2'-fluoroadenosine-3'-phosphate
  modified_base 12: mod_base = OTHER; note = 2'-O-methyluridine-3'-phosphate
  modified_base 13: mod_base = OTHER; note = 2'-O-methylcytidine-3'-phosphate
  modified_base 14: mod_base = OTHER; note = 2'-O-methylcytidine-3'-phosphate
  modified_base 15: mod_base = OTHER; note = 2'-O-methylcytidine-3'-phosphate
  modified_base 16: mod_base = OTHER; note = 2'-O-methyladenosine-3'-phosphate
  modified_base 17: mod_base = OTHER; note = 2'-O-methylguanosine-3'-phosphate
  modified_base 18: mod_base = OTHER; note = 2'-O-methylcytidine-3'-phosphate
  modified_base 19: mod_base = OTHER; note = 2'-O-methylcytidine-3'-phosphate
  modified_base 20: mod_base = OTHER; note = 2'-O-methyluridine-3'-phosphate
  modified_base 21: mod_base = OTHER; note = 2'-O-methyluridine-3'-phosphate ((2S,4R)-1-[29-[[2-(acetylamino)-2-deoxy-beta-D-galactopyra nosyl]oxy]-14,14-bis[[3-[[3-[[5-[[2-(acetylamino)-2-deoxy-b eta-D-galactopyranosyl]oxy]-1-oxopentyl]amino]propyl]amino] -3-oxopropoxy]methyl]-1,12,19,25-tetraoxo-16-oxa-13,20,24-t riazanonacos-1-yl]-4-hydroxy-2-pyrrolidinyl)methyl ester
gacgtggaggatcccagcctt

SEQ ID NO: 863 - RNA, 21 nt, synthetic construct
  source 1..21: mol_type = other RNA
  modified_base 1: mod_base = OTHER; note = 2'-O-methyluridine-3'-phosphorothioate
  modified_base 2: mod_base = OTHER; note = 2'-O-methylguanosine-3'-phosphorothioate
  modified_base 3: mod_base = OTHER; note = 2'-O-methylguanosine-3'-phosphate
  modified_base 4: mod_base = OTHER; note = 2'-O-methyladenosine-3'-phosphate
  modified_base 5: mod_base = OTHER; note = 2'-O-methylguanosine-3'-phosphate
  modified_base 6: mod_base = OTHER; note = 2'-O-methylguanosine-3'-phosphate
  modified_base 7: mod_base = OTHER; note = 2'-deoxy-2'-fluoroadenosine-3'-phosphate
  modified_base 8: mod_base = OTHER; note = 2'-O-methyluridine-3'-phosphate
  modified_base 9: mod_base = OTHER; note = 2'-deoxy-2'-fluorocytidine-3'-phosphate
  modified_base 10: mod_base = OTHER; note = 2'-deoxy-2'-fluorocytidine-3'-phosphate
  modified_base 11: mod_base = OTHER; note = 2'-deoxy-2'-fluorocytidine-3'-phosphate
  modified_base 12: mod_base = OTHER; note = 2'-O-methyladenosine-3'-phosphate
  modified_base 13: mod_base = OTHER; note = 2'-O-methylguanosine-3'-phosphate
  modified_base 14: mod_base = OTHER; note = 2'-O-methylcytidine-3'-phosphate
  modified_base 15: mod_base = OTHER; note = 2'-O-methylcytidine-3'-phosphate
  modified_base 16: mod_base = OTHER; note = 2'-O-methyluridine-3'-phosphate
  modified_base 17: mod_base = OTHER; note = 2'-O-methylcytidine-3'-phosphate
  modified_base 18: mod_base = OTHER; note = 2'-O-methyluridine-3'-phosphate
  modified_base 19: mod_base = OTHER; note = 2'-O-methylguanosine-3'-phosphate
  modified_base 20: mod_base = OTHER; note = 2'-O-methyladenosine-3'-phosphate
  modified_base 21: mod_base = OTHER; note = 2'-O-methyluridine-3'-phosphate ((2S,4R)-1-[29-[[2-(acetylamino)-2-deoxy-beta-D-galactopyra nosyl]oxy]-14,14-bis[[3-[[3-[[5-[[2-(acetylamino)-2-deoxy-b eta-D-galactopyranosyl]oxy]-1-oxopentyl]amino]propyl]amino] -3-oxopropoxy]methyl]-1,12,19,25-tetraoxo-16-oxa-13,20,24-t riazanonacos-1-yl]-4-hydroxy-2-pyrrolidinyl)methyl ester
tggaggatcccagcctctgat

SEQ ID NO: 864 - RNA, 21 nt, synthetic construct
  source 1..21: mol_type = other RNA
  modified_base 1: mod_base = OTHER; note = 2'-O-methyluridine-3'-phosphorothioate
  modified_base 2: mod_base = OTHER; note = 2'-O-methylguanosine-3'-phosphorothioate
  modified_base 3: mod_base = OTHER; note = 2'-O-methyladenosine-3'-phosphate
  modified_base 4: mod_base = OTHER; note = 2'-O-methylguanosine-3'-phosphate
  modified_base 5: mod_base = OTHER; note = 2'-O-methyluridine-3'-phosphate
  modified_base 6: mod_base = OTHER; note = 2'-O-methyluridine-3'-phosphate
  modified_base 7: mod_base = OTHER; note = 2'-deoxy-2'-fluoroguanosine-3'-phosphate
  modified_base 8: mod_base = OTHER; note = 2'-O-methylguanosine-3'-phosphate
  modified_base 9: mod_base = OTHER; note = 2'-deoxy-2'-fluorouridine-3'-phosphate
  modified_base 10: mod_base = OTHER; note = 2'-deoxy-2'-fluorouridine-3'-phosphate
  modified_base 11: mod_base = OTHER; note = 2'-deoxy-2'-fluorouridine-3'-phosphate
  modified_base 12: mod_base = OTHER; note = 2'-O-methyluridine-3'-phosphate
  modified_base 13: mod_base = OTHER; note = 2'-O-methyladenosine-3'-phosphate
  modified_base 14: mod_base = OTHER; note = 2'-O-methyluridine-3'-phosphate
  modified_base 15: mod_base = OTHER; note = 2'-O-methylguanosine-3'-phosphate
  modified_base 16: mod_base = OTHER; note = 2'-O-methyladenosine-3'-phosphate
  modified_base 17: mod_base = OTHER; note = 2'-O-methyladenosine-3'-phosphate
  modified_base 18: mod_base = OTHER; note = 2'-O-methyladenosine-3'-phosphate
  modified_base 19: mod_base = OTHER; note = 2'-O-methyladenosine-3'-phosphate
  modified_base 20: mod_base = OTHER; note = 2'-O-methylguanosine-3'-phosphate
  modified_base 21: mod_base = OTHER; note = 2'-O-methyluridine-3'-phosphate ((2S,4R)-1-[29-[[2-(acetylamino)-2-deoxy-beta-D-galactopyra nosyl]oxy]-14,14-bis[[3-[[3-[[5-[[2-(acetylamino)-2-deoxy-b eta-D-galactopyranosyl]oxy]-1-oxopentyl]amino]propyl]amino] -3-oxopropoxy]methyl]-1,12,19,25-tetraoxo-16-oxa-13,20,24-t riazanonacos-1-yl]-4-hydroxy-2-pyrrolidinyl)methyl ester
tgagttggttttatgaaaagt

SEQ ID NO: 865 - RNA, 21 nt, synthetic construct
  source 1..21: mol_type = other RNA
  modified_base 1: mod_base = OTHER; note = 2'-O-methylguanosine-3'-phosphorothioate
  modified_base 2: mod_base = OTHER; note = 2'-O-methylguanosine-3'-phosphorothioate
  modified_base 3: mod_base = OTHER; note = 2'-O-methyluridine-3'-phosphate
  modified_base 4: mod_base = OTHER; note = 2'-O-methyluridine-3'-phosphate
  modified_base 5: mod_base = OTHER; note = 2'-O-methyluridine-3'-phosphate
  modified_base 6: mod_base = OTHER; note = 2'-O-methyluridine-3'-phosphate
  modified_base 7: mod_base = OTHER; note = 2'-deoxy-2'-fluoroadenosine-3'-phosphate
  modified_base 8: mod_base = OTHER; note = 2'-O-methyluridine-3'-phosphate
  modified_base 9: mod_base = OTHER; note = 2'-deoxy-2'-fluoroguanosine-3'-phosphate
  modified_base 10: mod_base = OTHER; note = 2'-deoxy-2'-fluoroadenosine-3'-phosphate
  modified_base 11: mod_base = OTHER; note = 2'-deoxy-2'-fluoroadenosine-3'-phosphate
  modified_base 12: mod_base = OTHER; note = 2'-O-methyladenosine-3'-phosphate
  modified_base 13: mod_base = OTHER; note = 2'-O-methyladenosine-3'-phosphate
  modified_base 14: mod_base = OTHER; note = 2'-O-methylguanosine-3'-phosphate
  modified_base 15: mod_base = OTHER; note = 2'-O-methylcytidine-3'-phosphate
  modified_base 16: mod_base = OTHER; note = 2'-O-methyluridine-3'-phosphate
  modified_base 17: mod_base = OTHER; note = 2'-O-methyladenosine-3'-phosphate
  modified_base 18: mod_base = OTHER; note = 2'-O-methylguanosine-3'-phosphate
  modified_base 19: mod_base = OTHER; note = 2'-O-methylguanosine-3'-phosphate
  modified_base 20: mod_base = OTHER; note = 2'-O-methyladenosine-3'-phosphate
  modified_base 21: mod_base = OTHER; note = 2'-O-methyluridine-3'-phosphate ((2S,4R)-1-[29-[[2-(acetylamino)-2-deoxy-beta-D-galactopyra nosyl]oxy]-14,14-bis[[3-[[3-[[5-[[2-(acetylamino)-2-deoxy-b eta-D-galactopyranosyl]oxy]-1-oxopentyl]amino]propyl]amino] -3-oxopropoxy]methyl]-1,12,19,25-tetraoxo-16-oxa-13,20,24-t riazanonacos-1-yl]-4-hydroxy-2-pyrrolidinyl)methyl ester
ggttttatgaaaagctaggat

SEQ ID NO: 866 - RNA, 21 nt, synthetic construct
  source 1..21: mol_type = other RNA
  modified_base 1: mod_base = OTHER; note = 2'-O-methyluridine-3'-phosphorothioate
  modified_base 2: mod_base = OTHER; note = 2'-O-methyluridine-3'-phosphorothioate
  modified_base 3: mod_base = OTHER; note = 2'-O-methyluridine-3'-phosphate
  modified_base 4: mod_base = OTHER; note = 2'-O-methyladenosine-3'-phosphate
  modified_base 5: mod_base = OTHER; note = 2'-O-methyluridine-3'-phosphate
  modified_base 6: mod_base = OTHER; note = 2'-O-methylguanosine-3'-phosphate
  modified_base 7: mod_base = OTHER; note = 2'-deoxy-2'-fluoroadenosine-3'-phosphate
  modified_base 8: mod_base = OTHER; note = 2'-O-methyladenosine-3'-phosphate
  modified_base 9: mod_base = OTHER; note = 2'-deoxy-2'-fluoroadenosine-3'-phosphate
  modified_base 10: mod_base = OTHER; note = 2'-deoxy-2'-fluoroadenosine-3'-phosphate
  modified_base 11: mod_base = OTHER; note = 2'-deoxy-2'-fluoroguanosine-3'-phosphate
  modified_base 12: mod_base = OTHER; note = 2'-O-methylcytidine-3'-phosphate
  modified_base 13: mod_base = OTHER; note = 2'-O-methyluridine-3'-phosphate
  modified_base 14: mod_base = OTHER; note = 2'-O-methyladenosine-3'-phosphate
  modified_base 15: mod_base = OTHER; note = 2'-O-methylguanosine-3'-phosphate
  modified_base 16: mod_base = OTHER; note = 2'-O-methylguanosine-3'-phosphate
  modified_base 17: mod_base = OTHER; note = 2'-O-methyladenosine-3'-phosphate
  modified_base 18: mod_base = OTHER; note = 2'-O-methyladenosine-3'-phosphate
  modified_base 19: mod_base = OTHER; note = 2'-O-methylguanosine-3'-phosphate
  modified_base 20: mod_base = OTHER; note = 2'-O-methylcytidine-3'-phosphate
  modified_base 21: mod_base = OTHER; note = 2'-O-methyluridine-3'-phosphate ((2S,4R)-1-[29-[[2-(acetylamino)-2-deoxy-beta-D-galactopyra nosyl]oxy]-14,14-bis[[3-[[3-[[5-[[2-(acetylamino)-2-deoxy-b eta-D-galactopyranosyl]oxy]-1-oxopentyl]amino]propyl]amino] -3-oxopropoxy]methyl]-1,12,19,25-tetraoxo-16-oxa-13,20,24-t riazanonacos-1-yl]-4-hydroxy-2-pyrrolidinyl)methyl ester
tttatgaaaagctaggaagct

SEQ ID NO: 867 - RNA, 21 nt, synthetic construct
  source 1..21: mol_type = other RNA
  modified_base 1: mod_base = OTHER; note = 2'-O-methyluridine-3'-phosphorothioate
  modified_base 2: mod_base = OTHER; note = 2'-O-methyluridine-3'-phosphorothioate
  modified_base 3: mod_base = OTHER; note = 2'-O-methyladenosine-3'-phosphate
  modified_base 4: mod_base = OTHER; note = 2'-O-methyluridine-3'-phosphate
  modified_base 5: mod_base = OTHER; note = 2'-O-methylguanosine-3'-phosphate
  modified_base 6: mod_base = OTHER; note = 2'-O-methyladenosine-3'-phosphate
  modified_base 7: mod_base = OTHER; note = 2'-deoxy-2'-fluoroadenosine-3'-phosphate
  modified_base 8: mod_base = OTHER; note = 2'-O-methyladenosine-3'-phosphate
  modified_base 9: mod_base = OTHER; note = 2'-deoxy-2'-fluoroadenosine-3'-phosphate
  modified_base 10: mod_base = OTHER; note = 2'-deoxy-2'-fluoroguanosine-3'-phosphate
  modified_base 11: mod_base = OTHER; note = 2'-deoxy-2'-fluorocytidine-3'-phosphate
  modified_base 12: mod_base = OTHER; note = 2'-O-methyluridine-3'-phosphate
  modified_base 13: mod_base = OTHER; note = 2'-O-methyladenosine-3'-phosphate
  modified_base 14: mod_base = OTHER; note = 2'-O-methylguanosine-3'-phosphate
  modified_base 15: mod_base = OTHER; note = 2'-O-methylguanosine-3'-phosphate
  modified_base 16: mod_base = OTHER; note = 2'-O-methyladenosine-3'-phosphate
  modified_base 17: mod_base = OTHER; note = 2'-O-methyladenosine-3'-phosphate
  modified_base 18: mod_base = OTHER; note = 2'-O-methylguanosine-3'-phosphate
  modified_base 19: mod_base = OTHER; note = 2'-O-methylcytidine-3'-phosphate
  modified_base 20: mod_base = OTHER; note = 2'-O-methyladenosine-3'-phosphate
  modified_base 21: mod_base = OTHER; note = 2'-O-methyluridine-3'-phosphate ((2S,4R)-1-[29-[[2-(acetylamino)-2-deoxy-beta-D-galactopyra nosyl]oxy]-14,14-bis[[3-[[3-[[5-[[2-(acetylamino)-2-deoxy-b eta-D-galactopyranosyl]oxy]-1-oxopentyl]amino]propyl]amino] -3-oxopropoxy]methyl]-1,12,19,25-tetraoxo-16-oxa-13,20,24-t riazanonacos-1-yl]-4-hydroxy-2-pyrrolidinyl)methyl ester
ttatgaaaagctaggaagcat

SEQ ID NO: 868 - RNA, 21 nt, synthetic construct
  source 1..21: mol_type = other RNA
  modified_base 1: mod_base = OTHER; note = 2'-O-methyladenosine-3'-phosphorothioate
  modified_base 2: mod_base = OTHER; note = 2'-O-methyladenosine-3'-phosphorothioate
  modified_base 3: mod_base = OTHER; note = 2'-O-methyluridine-3'-phosphate
  modified_base 4: mod_base = OTHER; note = 2'-O-methyluridine-3'-phosphate
  modified_base 5: mod_base = OTHER; note = 2'-O-methylcytidine-3'-phosphate
  modified_base 6: mod_base = OTHER; note = 2'-O-methyladenosine-3'-phosphate
  modified_base 7: mod_base = OTHER; note = 2'-deoxy-2'-fluoroguanosine-3'-phosphate
  modified_base 8: mod_base = OTHER; note = 2'-O-methylcytidine-3'-phosphate
  modified_base 9: mod_base = OTHER; note = 2'-deoxy-2'-fluorouridine-3'-phosphate
  modified_base 10: mod_base = OTHER; note = 2'-deoxy-2'-fluoroguanosine-3'-phosphate
  modified_base 11: mod_base = OTHER; note = 2'-deoxy-2'-fluoroguanosine-3'-phosphate
  modified_base 12: mod_base = OTHER; note = 2'-O-methyluridine-3'-phosphate
  modified_base 13: mod_base = OTHER; note = 2'-O-methyluridine-3'-phosphate
  modified_base 14: mod_base = OTHER; note = 2'-O-methylguanosine-3'-phosphate
  modified_base 15: mod_base = OTHER; note = 2'-O-methylguanosine-3'-phosphate
  modified_base 16: mod_base = OTHER; note = 2'-O-methylguanosine-3'-phosphate
  modified_base 17: mod_base = OTHER; note = 2'-O-methyladenosine-3'-phosphate
  modified_base 18: mod_base = OTHER; note = 2'-O-methyladenosine-3'-phosphate
  modified_base 19: mod_base = OTHER; note = 2'-O-methyladenosine-3'-phosphate
  modified_base 20: mod_base = OTHER; note = 2'-O-methyluridine-3'-phosphate
  modified_base 21: mod_base = OTHER; note = 2'-O-methyluridine-3'-phosphate ((2S,4R)-1-[29-[[2-(acetylamino)-2-deoxy-beta-D-galactopyra nosyl]oxy]-14,14-bis[[3-[[3-[[5-[[2-(acetylamino)-2-deoxy-b eta-D-galactopyranosyl]oxy]-1-oxopentyl]amino]propyl]amino] -3-oxopropoxy]methyl]-1,12,19,25-tetraoxo-16-oxa-13,20,24-t riazanonacos-1-yl]-4-hydroxy-2-pyrrolidinyl)methyl ester
aattcagctggttgggaaatt

SEQ ID NO: 869 - RNA, 21 nt, synthetic construct
  source 1..21: mol_type = other RNA
  modified_base 1: mod_base = OTHER; note = 2'-O-methylcytidine-3'-phosphorothioate
  modified_base 2: mod_base = OTHER; note = 2'-O-methyladenosine-3'-phosphorothioate
  modified_base 3: mod_base = OTHER; note = 2'-O-methylguanosine-3'-phosphate
  modified_base 4: mod_base = OTHER; note = 2'-O-methyladenosine-3'-phosphate
  modified_base 5: mod_base = OTHER; note = 2'-O-methylguanosine-3'-phosphate
  modified_base 6: mod_base = OTHER; note = 2'-O-methylguanosine-3'-phosphate
  modified_base 7: mod_base = OTHER; note = 2'-deoxy-2'-fluoroguanosine-3'-phosphate
  modified_base 8: mod_base = OTHER; note = 2'-O-methyluridine-3'-phosphate
  modified_base 9: mod_base = OTHER; note = 2'-deoxy-2'-fluorocytidine-3'-phosphate
  modified_base 10: mod_base = OTHER; note = 2'-deoxy-2'-fluorocytidine-3'-phosphate
  modified_base 11: mod_base = OTHER; note = 2'-deoxy-2'-fluorocytidine-3'-phosphate
  modified_base 12: mod_base = OTHER; note = 2'-O-methyluridine-3'-phosphate
  modified_base 13: mod_base = OTHER; note = 2'-O-methyluridine-3'-phosphate
  modified_base 14: mod_base = OTHER; note = 2'-O-methyladenosine-3'-phosphate
  modified_base 15: mod_base = OTHER; note = 2'-O-methylcytidine-3'-phosphate
  modified_base 16: mod_base = OTHER; note = 2'-O-methyluridine-3'-phosphate
  modified_base 17: mod_base = OTHER; note = 2'-O-methylguanosine-3'-phosphate
  modified_base 18: mod_base = OTHER; note = 2'-O-methyladenosine-3'-phosphate
  modified_base 19: mod_base = OTHER; note = 2'-O-methylcytidine-3'-phosphate
  modified_base 20: mod_base = OTHER; note = 2'-O-methyluridine-3'-phosphate
  modified_base 21: mod_base = OTHER; note = 2'-O-methyluridine-3'-phosphate ((2S,4R)-1-[29-[[2-(acetylamino)-2-deoxy-beta-D-galactopyra nosyl]oxy]-14,14-bis[[3-[[3-[[5-[[2-(acetylamino)-2-deoxy-b eta-D-galactopyranosyl]oxy]-1-oxopentyl]amino]propyl]amino] -3-oxopropoxy]methyl]-1,12,19,25-tetraoxo-16-oxa-13,20,24-t riazanonacos-1-yl]-4-hydroxy-2-pyrrolidinyl)methyl ester
cagagggtcccttactgactt

SEQ ID NO: 870 - RNA, 21 nt, synthetic construct
  source 1..21: mol_type = other RNA
  modified_base 1: mod_base = OTHER; note = 2'-O-methyluridine-3'-phosphorothioate
  modified_base 2: mod_base = OTHER; note = 2'-O-methyladenosine-3'-phosphorothioate
  modified_base 3: mod_base = OTHER; note = 2'-O-methyluridine-3'-phosphate
  modified_base 4: mod_base = OTHER; note = 2'-O-methyluridine-3'-phosphate
  modified_base 5: mod_base = OTHER; note = 2'-O-methyladenosine-3'-phosphate
  modified_base 6: mod_base = OTHER; note = 2'-O-methyladenosine-3'-phosphate
  modified_base 7: mod_base = OTHER; note = 2'-deoxy-2'-fluorouridine-3'-phosphate
  modified_base 8: mod_base = OTHER; note = 2'-O-methylguanosine-3'-phosphate
  modified_base 9: mod_base = OTHER; note = 2'-deoxy-2'-fluoroguanosine-3'-phosphate
  modified_base 10: mod_base = OTHER; note = 2'-deoxy-2'-fluorouridine-3'-phosphate
  modified_base 11: mod_base = OTHER; note = 2'-deoxy-2'-fluorocytidine-3'-phosphate
  modified_base 12: mod_base = OTHER; note = 2'-O-methyladenosine-3'-phosphate
  modified_base 13: mod_base = OTHER; note = 2'-O-methylguanosine-3'-phosphate
  modified_base 14: mod_base = OTHER; note = 2'-O-methyladenosine-3'-phosphate
  modified_base 15: mod_base = OTHER; note = 2'-O-methylcytidine-3'-phosphate
  modified_base 16: mod_base = OTHER; note = 2'-O-methyluridine-3'-phosphate
  modified_base 17: mod_base = OTHER; note = 2'-O-methylguanosine-3'-phosphate
  modified_base 18: mod_base = OTHER; note = 2'-O-methyluridine-3'-phosphate
  modified_base 19: mod_base = OTHER; note = 2'-O-methyluridine-3'-phosphate
  modified_base 20: mod_base = OTHER; note = 2'-O-methylcytidine-3'-phosphate
  modified_base 21: mod_base = OTHER; note = 2'-O-methyluridine-3'-phosphate ((2S,4R)-1-[29-[[2-(acetylamino)-2-deoxy-beta-D-galactopyra nosyl]oxy]-14,14-bis[[3-[[3-[[5-[[2-(acetylamino)-2-deoxy-b eta-D-galactopyranosyl]oxy]-1-oxopentyl]amino]propyl]amino] -3-oxopropoxy]methyl]-1,12,19,25-tetraoxo-16-oxa-13,20,24-t riazanonacos-1-yl]-4-hydroxy-2-pyrrolidinyl)methyl ester
tattaatggtcagactgttct

SEQ ID NO: 871 - RNA, 21 nt, synthetic construct
  source 1..21: mol_type = other RNA
  modified_base 1: mod_base = OTHER; note = 2'-O-methyladenosine-3'-phosphorothioate
  modified_base 2: mod_base = OTHER; note = 2'-O-methyladenosine-3'-phosphorothioate
  modified_base 3: mod_base = OTHER; note = 2'-O-methylcytidine-3'-phosphate
  modified_base 4: mod_base = OTHER; note = 2'-O-methyladenosine-3'-phosphate
  modified_base 5: mod_base = OTHER; note = 2'-O-methylcytidine-3'-phosphate
  modified_base 6: mod_base = OTHER; note = 2'-O-methylcytidine-3'-phosphate
  modified_base 7: mod_base = OTHER; note = 2'-deoxy-2'-fluorouridine-3'-phosphate
  modified_base 8: mod_base = OTHER; note = 2'-O-methyluridine-3'-phosphate
  modified_base 9: mod_base = OTHER; note = 2'-deoxy-2'-fluorouridine-3'-phosphate
  modified_base 10: mod_base = OTHER; note = 2'-deoxy-2'-fluorouridine-3'-phosphate
  modified_base 11: mod_base = OTHER; note = 2'-deoxy-2'-fluorouridine-3'-phosphate
  modified_base 12: mod_base = OTHER; note = 2'-O-methylcytidine-3'-phosphate
  modified_base 13: mod_base = OTHER; note = 2'-O-methyladenosine-3'-phosphate
  modified_base 14: mod_base = OTHER; note = 2'-O-methylcytidine-3'-phosphate
  modified_base 15: mod_base = OTHER; note = 2'-O-methylcytidine-3'-phosphate
  modified_base 16: mod_base = OTHER; note = 2'-O-methyluridine-3'-phosphate
  modified_base 17: mod_base = OTHER; note = 2'-O-methyladenosine-3'-phosphate
  modified_base 18: mod_base = OTHER; note = 2'-O-methyladenosine-3'-phosphate
  modified_base 19: mod_base = OTHER; note = 2'-O-methylcytidine-3'-phosphate
  modified_base 20: mod_base = OTHER; note = 2'-O-methyluridine-3'-phosphate
  modified_base 21: mod_base = OTHER; note = 2'-O-methyluridine-3'-phosphate ((2S,4R)-1-[29-[[2-(acetylamino)-2-deoxy-beta-D-galactopyra nosyl]oxy]-14,14-bis[[3-[[3-[[5-[[2-(acetylamino)-2-deoxy-b eta-D-galactopyranosyl]oxy]-1-oxopentyl]amino]propyl]amino] -3-oxopropoxy]methyl]-1,12,19,25-tetraoxo-16-oxa-13,20,24-t riazanonacos-1-yl]-4-hydroxy-2-pyrrolidinyl)methyl ester
aacacctttttcacctaactt

SEQ ID NO: 872 - RNA, 21 nt, synthetic construct
  source 1..21: mol_type = other RNA
  modified_base 1: mod_base = OTHER; note = 2'-O-methylcytidine-3'-phosphorothioate
  modified_base 2: mod_base = OTHER; note = 2'-O-methylcytidine-3'-phosphorothioate
  modified_base 3: mod_base = OTHER; note = 2'-O-methyluridine-3'-phosphate
  modified_base 4: mod_base = OTHER; note = 2'-O-methyluridine-3'-phosphate
  modified_base 5: mod_base = OTHER; note = 2'-O-methyluridine-3'-phosphate
  modified_base 6: mod_base = OTHER; note = 2'-O-methyluridine-3'-phosphate
  modified_base 7: mod_base = OTHER; note = 2'-deoxy-2'-fluorouridine-3'-phosphate
  modified_base 8: mod_base = OTHER; note = 2'-O-methylcytidine-3'-phosphate
  modified_base 9: mod_base = OTHER; note = 2'-deoxy-2'-fluoroadenosine-3'-phosphate
  modified_base 10: mod_base = OTHER; note = 2'-deoxy-2'-fluorocytidine-3'-phosphate
  modified_base 11: mod_base = OTHER; note = 2'-deoxy-2'-fluorocytidine-3'-phosphate
  modified_base 12: mod_base = OTHER; note = 2'-O-methyluridine-3'-phosphate
  modified_base 13: mod_base = OTHER; note = 2'-O-methyladenosine-3'-phosphate
  modified_base 14: mod_base = OTHER; note = 2'-O-methyladenosine-3'-phosphate
  modified_base 15: mod_base = OTHER; note = 2'-O-methylcytidine-3'-phosphate
  modified_base 16: mod_base = OTHER; note = 2'-O-methyluridine-3'-phosphate
  modified_base 17: mod_base = OTHER; note = 2'-O-methyladenosine-3'-phosphate
  modified_base 18: mod_base = OTHER; note = 2'-O-methyladenosine-3'-phosphate
  modified_base 19: mod_base = OTHER; note = 2'-O-methyladenosine-3'-phosphate
  modified_base 20: mod_base = OTHER; note = 2'-O-methyladenosine-3'-phosphate
  modified_base 21: mod_base = OTHER; note = 2'-O-methyluridine-3'-phosphate ((2S,4R)-1-[29-[[2-(acetylamino)-2-deoxy-beta-D-galactopyra nosyl]oxy]-14,14-bis[[3-[[3-[[5-[[2-(acetylamino)-2-deoxy-b eta-D-galactopyranosyl]oxy]-1-oxopentyl]amino]propyl]amino] -3-oxopropoxy]methyl]-1,12,19,25-tetraoxo-16-oxa-13,20,24-t riazanonacos-1-yl]-4-hydroxy-2-pyrrolidinyl)methyl ester
cctttttcacctaactaaaat

SEQ ID NO: 873 - RNA, 23 nt, synthetic construct
  source 1..23: mol_type = other RNA
  modified_base 1: mod_base = OTHER; note = 2'-O-methyladenosine-3'-phosphorothioate
  modified_base 2: mod_base = OTHER; note = 2'-deoxy-2'-fluoroadenosine-3'-phosphorothioate
  modified_base 3: mod_base = OTHER; note = 2'-O-methyladenosine-3'-phosphate
  modified_base 4: mod_base = OTHER; note = 2'-O-methylguanosine-3'-phosphate
  modified_base 5: mod_base = OTHER; note = 2'-O-methylguanosine-3'-phosphate
  modified_base 6: mod_base = OTHER; note = 2'-deoxy-2'-fluoroadenosine-3'-phosphate
  modified_base 7: mod_base = OTHER; note = 2'-O-methylcytidine-3'-phosphate
  modified_base 8: mod_base = OTHER; note = 2'-O-methyladenosine-3'-phosphate
  modified_base 9: mod_base = OTHER; note = 2'-O-methyladenosine-3'-phosphate
  modified_base 10: mod_base = OTHER; note = 2'-O-methylguanosine-3'-phosphate
  modified_base 11: mod_base = OTHER; note = 2'-O-methylcytidine-3'-phosphate
  modified_base 12: mod_base = OTHER; note = 2'-O-methyluridine-3'-phosphate
  modified_base 13: mod_base = OTHER; note = 2'-O-methylcytidine-3'-phosphate
  modified_base 14: mod_base = OTHER; note = 2'-deoxy-2'-fluorocytidine-3'-phosphate
  modified_base 15: mod_base = OTHER; note = 2'-O-methyladenosine-3'-phosphate
  modified_base 16: mod_base = OTHER; note = 2'-deoxy-2'-fluoroguanosine-3'-phosphate
  modified_base 17: mod_base = OTHER; note = 2'-O-methylcytidine-3'-phosphate
  modified_base 18: mod_base = OTHER; note = 2'-O-methylcytidine-3'-phosphate
  modified_base 19: mod_base = OTHER; note = 2'-O-methylguanosine-3'-phosphate
  modified_base 20: mod_base = OTHER; note = 2'-O-methylcytidine-3'-phosphate
  modified_base 21: mod_base = OTHER; note = 2'-O-methylguanosine-3'-phosphorothioate
  modified_base 22: mod_base = OTHER; note = 2'-O-methylcytidine-3'-phosphorothioate
  modified_base 23: mod_base = OTHER; note = 2'-O-methyluridine
aaaggacaagctccagccgcgct

SEQ ID NO: 874 - DNA, 23 bp, synthetic construct
  source 1..23: mol_type = other DNA
  modified_base 1: mod_base = OTHER; note = 2'-O-methyladenosine-3'-phosphorothioate
  modified_base 2: mod_base = OTHER; note = 2'-deoxy-2'-fluoroguanosine-3'-phosphorothioate
  modified_base 3: mod_base = OTHER; note = 2'-O-methyluridine-3'-phosphate
  modified_base 4: mod_base = OTHER; note = 2'-O-methyladenosine-3'-phosphate
  modified_base 6: mod_base = OTHER; note = 2'-O-methyladenosine-3'-phosphate
  modified_base 7: mod_base = OTHER; note = Adenosine-glycol nucleic acid (GNA), S-isomer
  modified_base 8: mod_base = OTHER; note = 2'-O-methylguanosine-3'-phosphate
  modified_base 9: mod_base = OTHER; note = 2'-O-methylcytidine-3'-phosphate
  modified_base 10: mod_base = OTHER; note = 2'-O-methylcytidine-3'-phosphate
  modified_base 11: mod_base = OTHER; note = 2'-O-methylcytidine-3'-phosphate
  modified_base 12: mod_base = OTHER; note = 2'-O-methyladenosine-3'-phosphate
  modified_base 13: mod_base = OTHER; note = 2'-O-methylguanosine-3'-phosphate
  modified_base 14: mod_base = OTHER; note = 2'-deoxy-2'-fluoroguanosine-3'-phosphate
  modified_base 15: mod_base = OTHER; note = 2'-O-methyladenosine-3'-phosphate
  modified_base 16: mod_base = OTHER; note = 2'-deoxy-2'-fluoroadenosine-3'-phosphate
  modified_base 17: mod_base = OTHER; note = 2'-O-methylguanosine-3'-phosphate
  modified_base 18: mod_base = OTHER; note = 2'-O-methylcytidine-3'-phosphate
  modified_base 19: mod_base = OTHER; note = 2'-O-methylcytidine-3'-phosphate
  modified_base 20: mod_base = OTHER; note = 2'-O-methylguanosine-3'-phosphate
  modified_base 21: mod_base = OTHER; note = 2'-O-methylcytidine-3'-phosphorothioate
  modified_base 22: mod_base = OTHER; note = 2'-O-methyladenosine-3'-phosphorothioate
  modified_base 23: mod_base = OTHER; note = 2'-O-methylguanosine
  misc_feature 1..4: note = RNA
  misc_feature 6..23: note = RNA
  misc_feature 5: note = DNA
agtagaagcccaggaagccgcag

SEQ ID NO: 875 - RNA, 23 nt, synthetic construct
  source 1..23: mol_type = other RNA
  modified_base 1: mod_base = OTHER; note = 2'-O-methyladenosine-3'-phosphorothioate
  modified_base 2: mod_base = OTHER; note = 2'-deoxy-2'-fluoroguanosine-3'-phosphorothioate
  modified_base 3: mod_base = OTHER; note = 2'-O-methylguanosine-3'-phosphate
  modified_base 4: mod_base = OTHER; note = 2'-O-methyluridine-3'-phosphate
  modified_base 5: mod_base = OTHER; note = 2'-O-methyladenosine-3'-phosphate
  modified_base 6: mod_base = OTHER; note = 2'-deoxy-2'-fluoroguanosine-3'-phosphate
  modified_base 7: mod_base = OTHER; note = 2'-O-methyladenosine-3'-phosphate
  modified_base 8: mod_base = OTHER; note = 2'-O-methyladenosine-3'-phosphate
  modified_base 9: mod_base = OTHER; note = 2'-O-methylguanosine-3'-phosphate
  modified_base 10: mod_base = OTHER; note = 2'-O-methylcytidine-3'-phosphate
  modified_base 11: mod_base = OTHER; note = 2'-O-methylcytidine-3'-phosphate
  modified_base 12: mod_base = OTHER; note = 2'-O-methylcytidine-3'-phosphate
  modified_base 13: mod_base = OTHER; note = 2'-O-methyladenosine-3'-phosphate
  modified_base 14: mod_base = OTHER; note = 2'-deoxy-2'-fluoroguanosine-3'-phosphate
  modified_base 15: mod_base = OTHER; note = 2'-O-methylguanosine-3'-phosphate
  modified_base 16: mod_base = OTHER; note = 2'-deoxy-2'-fluoroadenosine-3'-phosphate
  modified_base 17: mod_base = OTHER; note = 2'-O-methyladenosine-3'-phosphate
  modified_base 18: mod_base = OTHER; note = 2'-O-methylguanosine-3'-phosphate
  modified_base 19: mod_base = OTHER; note = 2'-O-methylcytidine-3'-phosphate
  modified_base 20: mod_base = OTHER; note = 2'-O-methylcytidine-3'-phosphate
  modified_base 21: mod_base = OTHER; note = 2'-O-methylguanosine-3'-phosphorothioate
  modified_base 22: mod_base = OTHER; note = 2'-O-methylcytidine-3'-phosphorothioate
  modified_base 23: mod_base = OTHER; note = 2'-O-methyladenosine
aggtagaagcccaggaagccgca

SEQ ID NO: 876 - DNA, 23 bp, synthetic construct
  source 1..23: mol_type = other DNA
  modified_base 1: mod_base = OTHER; note = 2'-O-methyladenosine-3'-phosphorothioate
  modified_base 2: mod_base = OTHER; note = 2'-deoxy-2'-fluoroguanosine-3'-phosphorothioate
  modified_base 3: mod_base = OTHER; note = 2'-O-methylguanosine-3'-phosphate
  modified_base 4: mod_base = OTHER; note = 2'-O-methyluridine-3'-phosphate
  modified_base 6: mod_base = OTHER; note = 2'-O-methylguanosine-3'-phosphate
  modified_base 7: mod_base = OTHER; note = Adenosine-glycol nucleic acid (GNA), S-isomer
  modified_base 8: mod_base = OTHER; note = 2'-O-methyladenosine-3'-phosphate
  modified_base 9: mod_base = OTHER; note = 2'-O-methylguanosine-3'-phosphate
  modified_base 10: mod_base = OTHER; note = 2'-O-methylcytidine-3'-phosphate
  modified_base 11: mod_base = OTHER; note = 2'-O-methylcytidine-3'-phosphate
  modified_base 12: mod_base = OTHER; note = 2'-O-methylcytidine-3'-phosphate
  modified_base 13: mod_base = OTHER; note = 2'-O-methyladenosine-3'-phosphate
  modified_base 14: mod_base = OTHER; note = 2'-deoxy-2'-fluoroguanosine-3'-phosphate
  modified_base 15: mod_base = OTHER; note = 2'-O-methylguanosine-3'-phosphate
  modified_base 16: mod_base = OTHER; note = 2'-deoxy-2'-fluoroadenosine-3'-phosphate
  modified_base 17: mod_base = OTHER; note = 2'-O-methyladenosine-3'-phosphate
  modified_base 18: mod_base = OTHER; note = 2'-O-methylguanosine-3'-phosphate
  modified_base 19: mod_base = OTHER; note = 2'-O-methylcytidine-3'-phosphate
  modified_base 20: mod_base = OTHER; note = 2'-O-methylcytidine-3'-phosphate
  modified_base 21: mod_base = OTHER; note = 2'-O-methylguanosine-3'-phosphorothioate
  modified_base 22: mod_base = OTHER; note = 2'-O-methylcytidine-3'-phosphorothioate
  modified_base 23: mod_base = OTHER; note = 2'-O-methyladenosine
  misc_feature 1..4: note = RNA
  misc_feature 6..23: note = RNA
  misc_feature 5: note = DNA
aggtagaagcccaggaagccgca

SEQ ID NO: 877 - DNA, 23 bp, synthetic construct
  source 1..23: mol_type = other DNA
  modified_base 1: mod_base = OTHER; note = 2'-O-methyladenosine-3'-phosphorothioate
  modified_base 2: mod_base = OTHER; note = 2'-deoxy-2'-fluorocytidine-3'-phosphorothioate
  modified_base 3: mod_base = OTHER; note = 2'-O-methylguanosine-3'-phosphate
  modified_base 4: mod_base = OTHER; note = 2'-O-methyluridine-3'-phosphate
  modified_base 6: mod_base = OTHER; note = 2'-O-methylguanosine-3'-phosphate
  modified_base 7: mod_base = OTHER; note = Thymidine-glycol nucleic acid (GNA), S-Isomer
  modified_base 8: mod_base = OTHER; note = 2'-O-methyladenosine-3'-phosphate
  modified_base 9: mod_base = OTHER; note = 2'-O-methylguanosine-3'-phosphate
  modified_base 10: mod_base = OTHER; note = 2'-O-methyladenosine-3'-phosphate
  modified_base 11: mod_base = OTHER; note = 2'-O-methyladenosine-3'-phosphate
  modified_base 12: mod_base = OTHER; note = 2'-O-methylguanosine-3'-phosphate
  modified_base 13: mod_base = OTHER; note = 2'-O-methylcytidine-3'-phosphate
  modified_base 14: mod_base = OTHER; note = 2'-deoxy-2'-fluorocytidine-3'-phosphate
  modified_base 15: mod_base = OTHER; note = 2'-O-methylcytidine-3'-phosphate
  modified_base 16: mod_base = OTHER; note = 2'-deoxy-2'-fluoroadenosine-3'-phosphate
  modified_base 17: mod_base = OTHER; note = 2'-O-methylguanosine-3'-phosphate
  modified_base 18: mod_base = OTHER; note = 2'-O-methylguanosine-3'-phosphate
  modified_base 19: mod_base = OTHER; note = 2'-O-methyladenosine-3'-phosphate
  modified_base 20: mod_base = OTHER; note = 2'-O-methyladenosine-3'-phosphate
  modified_base 21: mod_base = OTHER; note = 2'-O-methylguanosine-3'-phosphorothioate
  modified_base 22: mod_base = OTHER; note = 2'-O-methylcytidine-3'-phosphorothioate
  modified_base 23: mod_base = OTHER; note = 2'-O-methylcytidine
  misc_feature 1..4: note = RNA
  misc_feature 6..23: note = RNA
  misc_feature 5: note = DNA
acgtggtagaagcccaggaagcc

SEQ ID NO: 878 - RNA, 23 nt, synthetic construct
  source 1..23: mol_type = other RNA
  modified_base 1: mod_base = OTHER; note = 2'-O-methyladenosine-3'-phosphorothioate
  modified_base 2: mod_base = OTHER; note = 2'-deoxy-2'-fluorocytidine-3'-phosphorothioate
  modified_base 3: mod_base = OTHER; note = 2'-O-methylguanosine-3'-phosphate
  modified_base 4: mod_base = OTHER; note = 2'-O-methyladenosine-3'-phosphate
  modified_base 5: mod_base = OTHER; note = 2'-O-methylcytidine-3'-phosphate
  modified_base 6: mod_base = OTHER; note = 2'-deoxy-2'-fluoroguanosine-3'-phosphate
  modified_base 7: mod_base = OTHER; note = 2'-O-methyluridine-3'-phosphate
  modified_base 8: mod_base = OTHER; note = 2'-O-methylguanosine-3'-phosphate
  modified_base 9: mod_base = OTHER; note = 2'-O-methylguanosine-3'-phosphate
  modified_base 10: mod_base = OTHER; note = 2'-O-methyluridine-3'-phosphate
  modified_base 11: mod_base = OTHER; note = 2'-O-methyladenosine-3'-phosphate
  modified_base 12: mod_base = OTHER; note = 2'-O-methylguanosine-3'-phosphate
  modified_base 13: mod_base = OTHER; note = 2'-O-methyladenosine-3'-phosphate
  modified_base 14: mod_base = OTHER; note = 2'-deoxy-2'-fluoroadenosine-3'-phosphate
  modified_base 15: mod_base = OTHER; note = 2'-O-methylguanosine-3'-phosphate
  modified_base 16: mod_base = OTHER; note = 2'-deoxy-2'-fluorocytidine-3'-phosphate
  modified_base 17: mod_base = OTHER; note = 2'-O-methylcytidine-3'-phosphate
  modified_base 18: mod_base = OTHER; note = 2'-O-methylcytidine-3'-phosphate
  modified_base 19: mod_base = OTHER; note = 2'-O-methyladenosine-3'-phosphate
  modified_base 20: mod_base = OTHER; note = 2'-O-methylguanosine-3'-phosphate
  modified_base 21: mod_base = OTHER; note = 2'-O-methylguanosine-3'-phosphorothioate
  modified_base 22: mod_base = OTHER; note = 2'-O-methyladenosine-3'-phosphorothioate
  modified_base 23: mod_base = OTHER; note = 2'-O-methyladenosine
acgacgtggtagaagcccaggaa

SEQ ID NO: 879 - RNA, 23 nt, synthetic construct
  source 1..23: mol_type = other RNA
  modified_base 1: mod_base = OTHER; note = 2'-O-methyladenosine-3'-phosphorothioate
  modified_base 2: mod_base = OTHER; note = 2'-deoxy-2'-fluorocytidine-3'-phosphorothioate
  modified_base 3: mod_base = OTHER; note = 2'-O-methylcytidine-3'-phosphate
  modified_base 4: mod_base = OTHER; note = 2'-O-methylguanosine-3'-phosphate
  modified_base 5: mod_base = OTHER; note = 2'-O-methyladenosine-3'-phosphate
  modified_base 6: mod_base = OTHER; note = 2'-deoxy-2'-fluorocytidine-3'-phosphate
  modified_base 7: mod_base = OTHER; note = 2'-O-methylguanosine-3'-phosphate
  modified_base 8: mod_base = OTHER; note = 2'-O-methyluridine-3'-phosphate
  modified_base 9: mod_base = OTHER; note = 2'-O-methylguanosine-3'-phosphate
  modified_base 10: mod_base = OTHER; note = 2'-O-methylguanosine-3'-phosphate
  modified_base 11: mod_base = OTHER; note = 2'-O-methyluridine-3'-phosphate
  modified_base 12: mod_base = OTHER; note = 2'-O-methyladenosine-3'-phosphate
  modified_base 13: mod_base = OTHER; note = 2'-O-methylguanosine-3'-phosphate
  modified_base 14: mod_base = OTHER; note = 2'-deoxy-2'-fluoroadenosine-3'-phosphate
  modified_base 15: mod_base = OTHER; note = 2'-O-methyladenosine-3'-phosphate
  modified_base 16: mod_base = OTHER; note = 2'-deoxy-2'-fluoroguanosine-3'-phosphate
  modified_base 17: mod_base = OTHER; note = 2'-O-methylcytidine-3'-phosphate
  modified_base 18: mod_base = OTHER; note = 2'-O-methylcytidine-3'-phosphate
  modified_base 19: mod_base = OTHER; note = 2'-O-methylcytidine-3'-phosphate
  modified_base 20: mod_base = OTHER; note = 2'-O-methyladenosine-3'-phosphate
  modified_base 21: mod_base = OTHER; note = 2'-O-methylguanosine-3'-phosphorothioate
  modified_base 22: mod_base = OTHER; note = 2'-O-methylguanosine-3'-phosphorothioate
  modified_base 23: mod_base = OTHER; note = 2'-O-methyladenosine
accgacgtggtagaagcccagga

SEQ ID NO: 880 - RNA, 23 nt, synthetic construct
  source 1..23: mol_type = other RNA
  modified_base 1: mod_base = OTHER; note = 2'-O-methyladenosine-3'-phosphorothioate
  modified_base 2: mod_base = OTHER; note = 2'-deoxy-2'-fluoroadenosine-3'-phosphorothioate
  modified_base 3: mod_base = OTHER; note = 2'-O-methyladenosine-3'-phosphate
  modified_base 4: mod_base = OTHER; note = 2'-O-methylcytidine-3'-phosphate
  modified_base 5: mod_base = OTHER; note = 2'-O-methyladenosine-3'-phosphate
  modified_base 6: mod_base = OTHER; note = 2'-deoxy-2'-fluoroadenosine-3'-phosphate
  modified_base 7: mod_base = OTHER; note = 2'-O-methylcytidine-3'-phosphate
  modified_base 8: mod_base = OTHER; note = 2'-O-methyladenosine-3'-phosphate
  modified_base 9: mod_base = OTHER; note = 2'-O-methyluridine-3'-phosphate
  modified_base 10: mod_base = OTHER; note = 2'-O-methylguanosine-3'-phosphate
  modified_base 11: mod_base = OTHER; note = 2'-O-methylcytidine-3'-phosphate
  modified_base 12: mod_base = OTHER; note = 2'-O-methylguanosine-3'-phosphate
  modified_base 13: mod_base = OTHER; note = 2'-O-methylcytidine-3'-phosphate
  modified_base 14: mod_base = OTHER; note = 2'-deoxy-2'-fluoroguanosine-3'-phosphate
  modified_base 15: mod_base = OTHER; note = 2'-O-methylcytidine-3'-phosphate
  modified_base 16: mod_base = OTHER; note = 2'-deoxy-2'-fluoroguanosine-3'-phosphate
  modified_base 17: mod_base = OTHER; note = 2'-O-methyluridine-3'-phosphate
  modified_base 18: mod_base = OTHER; note = 2'-O-methylcytidine-3'-phosphate
  modified_base 19: mod_base = OTHER; note = 2'-O-methylguanosine-3'-phosphate
  modified_base 20: mod_base = OTHER; note = 2'-O-methylcytidine-3'-phosphate
  modified_base 21: mod_base = OTHER; note = 2'-O-methylguanosine-3'-phosphorothioate
  modified_base 22: mod_base = OTHER; note = 2'-O-methylguanosine-3'-phosphorothioate
  modified_base 23: mod_base = OTHER; note = 2'-O-methyladenosine
aaacaacatgcgcgcgtcgcgga

SEQ ID NO: 881 - DNA, 23 bp, synthetic construct
  source 1..23: mol_type = other DNA
  modified_base 1: mod_base = OTHER; note = 2'-O-methyladenosine-3'-phosphorothioate
  modified_base 2: mod_base = OTHER; note = 2'-deoxy-2'-fluorouridine-3'-phosphorothioate
  modified_base 3: mod_base = OTHER; note = 2'-O-methylguanosine-3'-phosphate
  modified_base 4: mod_base = OTHER; note = 2'-O-methylcytidine-3'-phosphate
  modified_base 6: mod_base = OTHER; note = 2'-O-methylguanosine-3'-phosphate
  modified_base 7: mod_base = OTHER; note = Adenosine-glycol nucleic acid (GNA), S-isomer
  modified_base 8: mod_base = OTHER; note = 2'-O-methylguanosine-3'-phosphate
  modified_base 9: mod_base = OTHER; note = 2'-O-methyluridine-3'-phosphate
  modified_base 10: mod_base = OTHER; note = 2'-O-methylcytidine-3'-phosphate
  modified_base 11: mod_base = OTHER; note = 2'-O-methyluridine-3'-phosphate
  modified_base 12: mod_base = OTHER; note = 2'-O-methylguanosine-3'-phosphate
  modified_base 13: mod_base = OTHER; note = 2'-O-methylcytidine-3'-phosphate
  modified_base 14: mod_base = OTHER; note = 2'-deoxy-2'-fluorouridine-3'-phosphate
  modified_base 15: mod_base = OTHER; note = 2'-O-methylcytidine-3'-phosphate
  modified_base 16: mod_base = OTHER; note = 2'-deoxy-2'-fluorocytidine-3'-phosphate
  modified_base 17: mod_base = OTHER; note = 2'-O-methyladenosine-3'-phosphate
  modified_base 18: mod_base = OTHER; note = 2'-O-methylguanosine-3'-phosphate
  modified_base 19: mod_base = OTHER; note = 2'-O-methylcytidine-3'-phosphate
  modified_base 20: mod_base = OTHER; note = 2'-O-methylguanosine-3'-phosphate
  modified_base 21: mod_base = OTHER; note = 2'-O-methylguanosine-3'-phosphorothioate
  modified_base 22: mod_base = OTHER; note = 2'-O-methylguanosine-3'-phosphorothioate
  modified_base 23: mod_base = OTHER; note = 2'-O-methyladenosine
  misc_feature 1..4: note = RNA
  misc_feature 6..23: note = RNA
  misc_feature 5: note = DNA
atgcagagtctgctccagcggga

SEQ ID NO: 882 - DNA, 23 bp, synthetic construct
  source 1..23: mol_type = other DNA
  modified_base 1: mod_base = OTHER; note = 2'-O-methyladenosine-3'-phosphorothioate
  modified_base 2: mod_base = OTHER; note = 2'-deoxy-2'-fluoroguanosine-3'-phosphorothioate
  modified_base 3: mod_base = OTHER; note = 2'-O-methylguanosine-3'-phosphate
  modified_base 4: mod_base = OTHER; note = 2'-O-methyladenosine-3'-phosphate
  modified_base 6: mod_base = OTHER; note = 2'-O-methylcytidine-3'-phosphate
  modified_base 7: mod_base = OTHER; note = Thymidine-glycol nucleic acid (GNA), S-Isomer
  modified_base 8: mod_base = OTHER; note = 2'-O-methylguanosine-3'-phosphate
  modified_base 9: mod_base = OTHER; note = 2'-O-methylcytidine-3'-phosphate
  modified_base 10: mod_base = OTHER; note = 2'-O-methyladenosine-3'-phosphate
  modified_base 11: mod_base = OTHER; note = 2'-O-methylguanosine-3'-phosphate
  modified_base 12: mod_base = OTHER; note = 2'-O-methyladenosine-3'-phosphate
  modified_base 13: mod_base = OTHER; note = 2'-O-methylguanosine-3'-phosphate
  modified_base 14: mod_base = OTHER; note = 2'-deoxy-2'-fluorouridine-3'-phosphate
  modified_base 15: mod_base = OTHER; note = 2'-O-methylcytidine-3'-phosphate
  modified_base 16: mod_base = OTHER; note = 2'-deoxy-2'-fluorouridine-3'-phosphate
  modified_base 17: mod_base = OTHER; note = 2'-O-methylguanosine-3'-phosphate
  modified_base 18: mod_base = OTHER; note = 2'-O-methylcytidine-3'-phosphate
  modified_base 19: mod_base = OTHER; note = 2'-O-methyluridine-3'-phosphate
  modified_base 20: mod_base = OTHER; note = 2'-O-methylcytidine-3'-phosphate
  modified_base 21: mod_base = OTHER; note = 2'-O-methylcytidine-3'-phosphorothioate
  modified_base 22: mod_base = OTHER; note = 2'-O-methyladenosine-3'-phosphorothioate
  modified_base 23: mod_base = OTHER; note = 2'-O-methylguanosine
  misc_feature 1..4: note = RNA
  misc_feature 6..23: note = RNA
  misc_feature 5: note = DNA
aggacctgcagagtctgctccag

SEQ ID NO: 883 - RNA, 23 nt, synthetic construct
  source 1..23: mol_type = other RNA
  modified_base 1: mod_base = OTHER; note = 2'-O-methyladenosine-3'-phosphorothioate
  modified_base 2: mod_base = OTHER; note = 2'-deoxy-2'-fluorocytidine-3'-phosphorothioate
  modified_base 3: mod_base = OTHER; note = 2'-O-methyluridine-3'-phosphate
  modified_base 4: mod_base = OTHER; note = 2'-O-methylguanosine-3'-phosphate
  modified_base 5: mod_base = OTHER; note = 2'-O-methyladenosine-3'-phosphate
  modified_base 6: mod_base = OTHER; note = 2'-deoxy-2'-fluoroguanosine-3'-phosphate
  modified_base 7: mod_base = OTHER; note = 2'-O-methyladenosine-3'-phosphate
  modified_base 8: mod_base = OTHER; note = 2'-O-methylguanosine-3'-phosphate
  modified_base 9: mod_base = OTHER; note = 2'-O-methylguanosine-3'-phosphate
  modified_base 10: mod_base = OTHER; note = 2'-O-methyladenosine-3'-phosphate
  modified_base 11: mod_base = OTHER; note = 2'-O-methylcytidine-3'-phosphate
  modified_base 12: mod_base = OTHER; note = 2'-O-methylcytidine-3'-phosphate
  modified_base 13: mod_base = OTHER; note = 2'-O-methyluridine-3'-phosphate
  modified_base 14: mod_base = OTHER; note = 2'-deoxy-2'-fluoroguanosine-3'-phosphate
  modified_base 15: mod_base = OTHER; note = 2'-O-methylcytidine-3'-phosphate
  modified_base 16: mod_base = OTHER; note = 2'-deoxy-2'-fluoroadenosine-3'-phosphate
  modified_base 17: mod_base = OTHER; note = 2'-O-methylguanosine-3'-phosphate
  modified_base 18: mod_base = OTHER; note = 2'-O-methyladenosine-3'-phosphate
  modified_base 19: mod_base = OTHER; note = 2'-O-methylguanosine-3'-phosphate
  modified_base 20: mod_base = OTHER; note = 2'-O-methyluridine-3'-phosphate
  modified_base 21: mod_base = OTHER; note = 2'-O-methylcytidine-3'-phosphorothioate
  modified_base 22: mod_base = OTHER; note = 2'-O-methyluridine-3'-phosphorothioate
  modified_base 23: mod_base = OTHER; note = 2'-O-methylguanosine
actgagaggacctgcagagtctg

SEQ ID NO: 884 - DNA, 23 bp, synthetic construct
  source 1..23: mol_type = other DNA
  modified_base 1: mod_base = OTHER; note = 2'-O-methyladenosine-3'-phosphorothioate
  modified_base 2: mod_base = OTHER; note = 2'-deoxy-2'-fluoroadenosine-3'-phosphorothioate
  modified_base 3: mod_base = OTHER; note = 2'-O-methyluridine-3'-phosphate
  modified_base 4: mod_base = OTHER; note = 2'-O-methylcytidine-3'-phosphate
  modified_base 6: mod_base = OTHER; note = 2'-O-methylguanosine-3'-phosphate
  modified_base 7: mod_base = OTHER; note = Adenosine-glycol nucleic acid (GNA), S-isomer
  modified_base 8: mod_base = OTHER; note = 2'-O-methylguanosine-3'-phosphate
  modified_base 9: mod_base = OTHER; note = 2'-O-methyladenosine-3'-phosphate
  modified_base 10: mod_base = OTHER; note = 2'-O-methylguanosine-3'-phosphate
  modified_base 11: mod_base = OTHER; note = 2'-O-methylguanosine-3'-phosphate
  modified_base 12: mod_base = OTHER; note = 2'-O-methyladenosine-3'-phosphate
  modified_base 13: mod_base = OTHER; note = 2'-O-methylcytidine-3'-phosphate
  modified_base 14: mod_base = OTHER; note = 2'-deoxy-2'-fluorocytidine-3'-phosphate
  modified_base 15: mod_base = OTHER; note = 2'-O-methyluridine-3'-phosphate
  modified_base 16: mod_base = OTHER; note = 2'-deoxy-2'-fluoroguanosine-3'-phosphate
  modified_base 17: mod_base = OTHER; note = 2'-O-methylcytidine-3'-phosphate
  modified_base 18: mod_base = OTHER; note = 2'-O-methyladenosine-3'-phosphate
  modified_base 19: mod_base = OTHER; note = 2'-O-methylguanosine-3'-phosphate
  modified_base 20: mod_base = OTHER; note = 2'-O-methyladenosine-3'-phosphate
  modified_base 21: mod_base = OTHER; note = 2'-O-methylguanosine-3'-phosphorothioate
  modified_base 22: mod_base = OTHER; note = 2'-O-methyluridine-3'-phosphorothioate
  modified_base 23: mod_base = OTHER; note = 2'-O-methylcytidine
  misc_feature 1..4: note = RNA
  misc_feature 6..23: note = RNA
  misc_feature 5: note = DNA
aatctgagaggacctgcagagtc

SEQ ID NO: 885 - DNA, 23 bp, synthetic construct
  source 1..23: mol_type = other DNA
  modified_base 1: mod_base = OTHER; note = 2'-O-methyladenosine-3'-phosphorothioate
  modified_base 2: mod_base = OTHER; note = 2'-deoxy-2'-fluoroadenosine-3'-phosphorothioate
  modified_base 3: mod_base = OTHER; note = 2'-O-methylguanosine-3'-phosphate
  modified_base 4: mod_base = OTHER; note = 2'-O-methyladenosine-3'-phosphate
  modified_base 6: mod_base = OTHER; note = 2'-O-methylcytidine-3'-phosphate
  modified_base 7: mod_base = OTHER; note = Thymidine-glycol nucleic acid (GNA), S-Isomer
  modified_base 8: mod_base = OTHER; note = 2'-O-methylguanosine-3'-phosphate
  modified_base 9: mod_base = OTHER; note = 2'-O-methyladenosine-3'-phosphate
  modified_base 10: mod_base = OTHER; note = 2'-O-methylguanosine-3'-phosphate
  modified_base 11: mod_base = OTHER; note = 2'-O-methyladenosine-3'-phosphate
  modified_base 12: mod_base = OTHER; note = 2'-O-methylguanosine-3'-phosphate
  modified_base 13: mod_base = OTHER; note = 2'-O-methylguanosine-3'-phosphate
  modified_base 14: mod_base = OTHER; note = 2'-deoxy-2'-fluoroadenosine-3'-phosphate
  modified_base 15: mod_base = OTHER; note = 2'-O-methylcytidine-3'-phosphate
  modified_base 16: mod_base = OTHER; note = 2'-deoxy-2'-fluorocytidine-3'-phosphate
  modified_base 17: mod_base = OTHER; note = 2'-O-methyluridine-3'-phosphate
  modified_base 18: mod_base = OTHER; note = 2'-O-methylguanosine-3'-phosphate
  modified_base 19: mod_base = OTHER; note = 2'-O-methylcytidine-3'-phosphate
  modified_base 20: mod_base = OTHER; note = 2'-O-methyladenosine-3'-phosphate
  modified_base 21: mod_base = OTHER; note = 2'-O-methylguanosine-3'-phosphorothioate
  modified_base 22: mod_base = OTHER; note = 2'-O-methyladenosine-3'-phosphorothioate
  modified_base 23: mod_base = OTHER; note = 2'-O-methylguanosine
  misc_feature 1..4: note = RNA
  misc_feature 6..23: note = RNA
  misc_feature 5: note = DNA
aagatctgagaggacctgcagag

SEQ ID NO: 886 - RNA, 23 nt, synthetic construct
  source 1..23: mol_type = other RNA
  modified_base 1: mod_base = OTHER; note = 2'-O-methyladenosine-3'-phosphorothioate
  modified_base 2: mod_base = OTHER; note = 2'-deoxy-2'-fluoroadenosine-3'-phosphorothioate
  modified_base 3: mod_base = OTHER; note = 2'-O-methyladenosine-3'-phosphate
  modified_base 4: mod_base = OTHER; note = 2'-O-methylguanosine-3'-phosphate
  modified_base 5: mod_base = OTHER; note = 2'-O-methyladenosine-3'-phosphate
  modified_base 6: mod_base = OTHER; note = 2'-deoxy-2'-fluorouridine-3'-phosphate
  modified_base 7: mod_base = OTHER; note = 2'-O-methylcytidine-3'-phosphate
  modified_base 8: mod_base = OTHER; note = 2'-O-methyluridine-3'-phosphate
  modified_base 9: mod_base = OTHER; note = 2'-O-methylguanosine-3'-phosphate
  modified_base 10: mod_base = OTHER; note = 2'-O-methyladenosine-3'-phosphate
  modified_base 11: mod_base = OTHER; note = 2'-O-methylguanosine-3'-phosphate
  modified_base 12: mod_base = OTHER; note = 2'-O-methyladenosine-3'-phosphate
  modified_base 13: mod_base = OTHER; note = 2'-O-methylguanosine-3'-phosphate
  modified_base 14: mod_base = OTHER; note = 2'-deoxy-2'-fluoroguanosine-3'-phosphate
  modified_base 15: mod_base = OTHER; note = 2'-O-methyladenosine-3'-phosphate
  modified_base 16: mod_base = OTHER; note = 2'-deoxy-2'-fluorocytidine-3'-phosphate
  modified_base 17: mod_base = OTHER; note = 2'-O-methylcytidine-3'-phosphate
  modified_base 18: mod_base = OTHER; note = 2'-O-methyluridine-3'-phosphate
  modified_base 19: mod_base = OTHER; note = 2'-O-methylguanosine-3'-phosphate
  modified_base 20: mod_base = OTHER; note = 2'-O-methylcytidine-3'-phosphate
  modified_base 21: mod_base = OTHER; note = 2'-O-methyladenosine-3'-phosphorothioate
  modified_base 22: mod_base = OTHER; note = 2'-O-methylguanosine-3'-phosphorothioate
  modified_base 23: mod_base = OTHER; note = 2'-O-methyladenosine
aaagatctgagaggacctgcaga

SEQ ID NO: 887 - RNA, 23 nt, synthetic construct
  source 1..23: mol_type = other RNA
  modified_base 1: mod_base = OTHER; note = 2'-O-methyladenosine-3'-phosphorothioate
  modified_base 2: mod_base = OTHER; note = 2'-deoxy-2'-fluorocytidine-3'-phosphorothioate
  modified_base 3: mod_base = OTHER; note = 2'-O-methyladenosine-3'-phosphate
  modified_base 4: mod_base = OTHER; note = 2'-O-methyladenosine-3'-phosphate
  modified_base 5: mod_base = OTHER; note = 2'-O-methylguanosine-3'-phosphate
  modified_base 6: mod_base = OTHER; note = 2'-deoxy-2'-fluoroadenosine-3'-phosphate
  modified_base 7: mod_base = OTHER; note = 2'-O-methyluridine-3'-phosphate
  modified_base 8: mod_base = OTHER; note = 2'-O-methylcytidine-3'-phosphate
  modified_base 9: mod_base = OTHER; note = 2'-O-methyluridine-3'-phosphate
  modified_base 10: mod_base = OTHER; note = 2'-O-methylguanosine-3'-phosphate
  modified_base 11: mod_base = OTHER; note = 2'-O-methyladenosine-3'-phosphate
  modified_base 12: mod_base = OTHER; note = 2'-O-methylguanosine-3'-phosphate
  modified_base 13: mod_base = OTHER; note = 2'-O-methyladenosine-3'-phosphate
  modified_base 14: mod_base = OTHER; note = 2'-deoxy-2'-fluoroguanosine-3'-phosphate
  modified_base 15: mod_base = OTHER; note = 2'-O-methylguanosine-3'-phosphate
  modified_base 16: mod_base = OTHER; note = 2'-deoxy-2'-fluoroadenosine-3'-phosphate
  modified_base 17: mod_base = OTHER; note = 2'-O-methylcytidine-3'-phosphate
  modified_base 18: mod_base = OTHER; note = 2'-O-methylcytidine-3'-phosphate
  modified_base 19: mod_base = OTHER; note = 2'-O-methyluridine-3'-phosphate
  modified_base 20: mod_base = OTHER; note = 2'-O-methylguanosine-3'-phosphate
  modified_base 21: mod_base = OTHER; note = 2'-O-methylcytidine-3'-phosphorothioate
  modified_base 22: mod_base = OTHER; note = 2'-O-methyladenosine-3'-phosphorothioate
  modified_base 23: mod_base = OTHER; note = 2'-O-methylguanosine
acaagatctgagaggacctgcag

SEQ ID NO: 888 - DNA, 23 bp, synthetic construct
  source 1..23: mol_type = other DNA
  modified_base 1: mod_base = OTHER; note = 2'-O-methyladenosine-3'-phosphorothioate
  modified_base 2: mod_base = OTHER; note = 2'-deoxy-2'-fluoroadenosine-3'-phosphorothioate
  modified_base 3: mod_base = OTHER; note = 2'-O-methyladenosine-3'-phosphate
  modified_base 4: mod_base = OTHER; note = 2'-O-methyluridine-3'-phosphate
  modified_base 6: mod_base = OTHER; note = 2'-O-methyluridine-3'-phosphate
  modified_base 7: mod_base = OTHER; note = Thymidine-glycol nucleic acid (GNA), S-Isomer
  modified_base 8: mod_base = OTHER; note = 2'-O-methylcytidine-3'-phosphate
  modified_base 9: mod_base = OTHER; note = 2'-O-methylcytidine-3'-phosphate
  modified_base 10: mod_base = OTHER; note = 2'-O-methylguanosine-3'-phosphate
  modified_base 11: mod_base = OTHER; note = 2'-O-methyladenosine-3'-phosphate
  modified_base 12: mod_base = OTHER; note = 2'-O-methylcytidine-3'-phosphate
  modified_base 13: mod_base = OTHER; note = 2'-O-methyluridine-3'-phosphate
  modified_base 14: mod_base = OTHER; note = 2'-deoxy-2'-fluorocytidine-3'-phosphate
  modified_base 15: mod_base = OTHER; note = 2'-O-methylcytidine-3'-phosphate
  modified_base 16: mod_base = OTHER; note = 2'-deoxy-2'-fluorouridine-3'-phosphate
  modified_base 17: mod_base = OTHER; note = 2'-O-methylguanosine-3'-phosphate
  modified_base 18: mod_base = OTHER; note = 2'-O-methylguanosine-3'-phosphate
  modified_base 19: mod_base = OTHER; note = 2'-O-methylcytidine-3'-phosphate
  modified_base 20: mod_base = OTHER; note = 2'-O-methylcytidine-3'-phosphate
  modified_base 21: mod_base = OTHER; note = 2'-O-methyluridine-3'-phosphorothioate
  modified_base 22: mod_base = OTHER; note = 2'-O-methyluridine-3'-phosphorothioate
  modified_base 23: mod_base = OTHER; note = 2'-O-methylcytidine
  misc_feature 1..4: note = RNA
  misc_feature 6..23: note = RNA
  misc_feature 5: note = DNA
aaatgttccgactcctggccttc

SEQ ID NO: 889 - DNA, 23 bp, synthetic construct
  source 1..23: mol_type = other DNA
  modified_base 1: mod_base = OTHER; note = 2'-O-methyladenosine-3'-phosphorothioate
  modified_base 2: mod_base = OTHER; note = 2'-deoxy-2'-fluorocytidine-3'-phosphorothioate
  modified_base 3: mod_base = OTHER; note = 2'-O-methyladenosine-3'-phosphate
  modified_base 4: mod_base = OTHER; note = 2'-O-methyladenosine-3'-phosphate
  modified_base 6: mod_base = OTHER; note = 2'-O-methylguanosine-3'-phosphate
  modified_base 7: mod_base = OTHER; note = Thymidine-glycol nucleic acid (GNA), S-Isomer
  modified_base 8: mod_base = OTHER; note = 2'-O-methyluridine-3'-phosphate
  modified_base 9: mod_base = OTHER; note = 2'-O-methylcytidine-3'-phosphate
  modified_base 10: mod_base = OTHER; note = 2'-O-methylcytidine-3'-phosphate
  modified_base 11: mod_base = OTHER; note = 2'-O-methylguanosine-3'-phosphate
  modified_base 12: mod_base = OTHER; note = 2'-O-methyladenosine-3'-phosphate
  modified_base 13: mod_base = OTHER; note = 2'-O-methylcytidine-3'-phosphate
  modified_base 14: mod_base = OTHER; note = 2'-deoxy-2'-fluorouridine-3'-phosphate
  modified_base 15: mod_base = OTHER; note = 2'-O-methylcytidine-3'-phosphate
  modified_base 16: mod_base = OTHER; note = 2'-deoxy-2'-fluorocytidine-3'-phosphate
  modified_base 17: mod_base = OTHER; note = 2'-O-methyluridine-3'-phosphate
  modified_base 18: mod_base = OTHER; note = 2'-O-methylguanosine-3'-phosphate
  modified_base 19: mod_base = OTHER; note = 2'-O-methylguanosine-3'-phosphate
  modified_base 20: mod_base = OTHER; note = 2'-O-methylcytidine-3'-phosphate
  modified_base 21: mod_base = OTHER; note = 2'-O-methylcytidine-3'-phosphorothioate
  modified_base 22: mod_base = OTHER; note = 2'-O-methyluridine-3'-phosphorothioate
  modified_base 23: mod_base = OTHER; note = 2'-O-methyluridine
  misc_feature 1..4: note = RNA
  misc_feature 6..23: note = RNA
  misc_feature 5: note = DNA
acaatgttccgactcctggcctt

SEQ ID NO: 890 - RNA, 23 nt, synthetic construct
  source 1..23: mol_type = other RNA
  modified_base 1: mod_base = OTHER; note = 2'-O-methyladenosine-3'-phosphorothioate
  modified_base 2: mod_base = OTHER; note = 2'-deoxy-2'-fluorocytidine-3'-phosphorothioate
  modified_base 3: mod_base = OTHER; note = 2'-O-methylcytidine-3'-phosphate
  modified_base 4: mod_base = OTHER; note = 2'-O-methyladenosine-3'-phosphate
  modified_base 5: mod_base = OTHER; note = 2'-O-methyladenosine-3'-phosphate
  modified_base 6: mod_base = OTHER; note = 2'-deoxy-2'-fluorouridine-3'-phosphate
  modified_base 7: mod_base = OTHER; note = 2'-O-methylguanosine-3'-phosphate
  modified_base 8: mod_base = OTHER; note = 2'-O-methyluridine-3'-phosphate
  modified_base 9: mod_base = OTHER; note = 2'-O-methyluridine-3'-phosphate
  modified_base 10: mod_base = OTHER; note = 2'-O-methylcytidine-3'-phosphate
  modified_base 11: mod_base = OTHER; note = 2'-O-methylcytidine-3'-phosphate
  modified_base 12: mod_base = OTHER; note = 2'-O-methylguanosine-3'-phosphate
  modified_base 13: mod_base = OTHER; note = 2'-O-methyladenosine-3'-phosphate
  modified_base 14: mod_base = OTHER; note = 2'-deoxy-2'-fluorocytidine-3'-phosphate
  modified_base 15: mod_base = OTHER; note = 2'-O-methyluridine-3'-phosphate
  modified_base 16: mod_base = OTHER; note = 2'-deoxy-2'-fluorocytidine-3'-phosphate
  modified_base 17: mod_base = OTHER; note = 2'-O-methylcytidine-3'-phosphate
  modified_base 18: mod_base = OTHER; note = 2'-O-methyluridine-3'-phosphate
  modified_base 19: mod_base = OTHER; note = 2'-O-methylguanosine-3'-phosphate
  modified_base 20: mod_base = OTHER; note = 2'-O-methylguanosine-3'-phosphate
  modified_base 21: mod_base = OTHER; note = 2'-O-methylcytidine-3'-phosphorothioate
  modified_base 22: mod_base = OTHER; note = 2'-O-methylcytidine-3'-phosphorothioate
  modified_base 23: mod_base = OTHER; note = 2'-O-methyluridine
accaatgttccgactcctggcct

SEQ ID NO: 891 - DNA, 23 bp, synthetic construct
  source 1..23: mol_type = other DNA
  modified_base 1: mod_base = OTHER; note = 2'-O-methyladenosine-3'-phosphorothioate
  modified_base 2: mod_base = OTHER; note = 2'-deoxy-2'-fluoroguanosine-3'-phosphorothioate
  modified_base 3: mod_base = OTHER; note = 2'-O-methyladenosine-3'-phosphate
  modified_base 4: mod_base = OTHER; note = 2'-O-methyladenosine-3'-phosphate
  modified_base 6: mod_base = OTHER; note = 2'-O-methylguanosine-3'-phosphate
  modified_base 7: mod_base = OTHER; note = Adenosine-glycol nucleic acid (GNA), S-isomer
  modified_base 8: mod_base = OTHER; note = 2'-O-methyluridine-3'-phosphate
  modified_base 9: mod_base = OTHER; note = 2'-O-methylguanosine-3'-phosphate
  modified_base 10: mod_base = OTHER; note = 2'-O-methylguanosine-3'-phosphate
  modified_base 11: mod_base = OTHER; note = 2'-O-methyladenosine-3'-phosphate
  modified_base 12: mod_base = OTHER; note = 2'-O-methyluridine-3'-phosphate
  modified_base 13: mod_base = OTHER; note = 2'-O-methylguanosine-3'-phosphate
  modified_base 14: mod_base = OTHER; note = 2'-deoxy-2'-fluoroguanosine-3'-phosphate
  modified_base 15: mod_base = OTHER; note = 2'-O-methyladenosine-3'-phosphate
  modified_base 16: mod_base = OTHER; note = 2'-deoxy-2'-fluoroadenosine-3'-phosphate
  modified_base 17: mod_base = OTHER; note = 2'-O-methylguanosine-3'-phosphate
  modified_base 18: mod_base = OTHER; note = 2'-O-methyladenosine-3'-phosphate
  modified_base 19: mod_base = OTHER; note = 2'-O-methyluridine-3'-phosphate
  modified_base 20: mod_base = OTHER; note = 2'-O-methylguanosine-3'-phosphate
  modified_base 21: mod_base = OTHER; note = 2'-O-methylcytidine-3'-phosphorothioate
  modified_base 22: mod_base = OTHER; note = 2'-O-methylcytidine-3'-phosphorothioate
  modified_base 23: mod_base = OTHER; note = 2'-O-methyladenosine
  misc_feature 1..4: note = RNA
  misc_feature 6..23: note = RNA
  misc_feature 5: note = DNA
agaaggatggatggaagatgcca

SEQ ID NO: 892 - DNA, 23 bp, synthetic construct
  source 1..23: mol_type = other DNA
  modified_base 1: mod_base = OTHER; note = 2'-O-methyladenosine-3'-phosphorothioate
  modified_base 2: mod_base = OTHER; note = 2'-deoxy-2'-fluorouridine-3'-phosphorothioate
  modified_base 3: mod_base = OTHER; note = 2'-O-methylguanosine-3'-phosphate
  modified_base 4: mod_base = OTHER; note = 2'-O-methylguanosine-3'-phosphate
  modified_base 6: mod_base = OTHER; note = 2'-O-methylcytidine-3'-phosphate
  modified_base 7: mod_base = OTHER; note = Adenosine-glycol nucleic acid (GNA), S-isomer
  modified_base 8: mod_base = OTHER; note = 2'-O-methyluridine-3'-phosphate
  modified_base 9: mod_base = OTHER; note = 2'-O-methyluridine-3'-phosphate
  modified_base 10: mod_base = OTHER; note = 2'-O-methylguanosine-3'-phosphate
  modified_base 11: mod_base = OTHER; note = 2'-O-methylguanosine-3'-phosphate
  modified_base 12: mod_base = OTHER; note = 2'-O-methylcytidine-3'-phosphate
  modified_base 13: mod_base = OTHER; note = 2'-O-methylcytidine-3'-phosphate
  modified_base 14: mod_base = OTHER; note = 2'-deoxy-2'-fluoroguanosine-3'-phosphate
  modified_base 15: mod_base = OTHER; note = 2'-O-methylguanosine-3'-phosphate
  modified_base 16: mod_base = OTHER; note = 2'-deoxy-2'-fluoroguanosine-3'-phosphate
  modified_base 17: mod_base = OTHER; note = 2'-O-methyladenosine-3'-phosphate
  modified_base 18: mod_base = OTHER; note = 2'-O-methylguanosine-3'-phosphate
  modified_base 19: mod_base = OTHER; note = 2'-O-methylguanosine-3'-phosphate
  modified_base 20: mod_base = OTHER; note = 2'-O-methylcytidine-3'-phosphate
  modified_base 21: mod_base = OTHER; note = 2'-O-methyladenosine-3'-phosphorothioate
  modified_base 22: mod_base = OTHER; note = 2'-O-methyluridine-3'-phosphorothioate
  modified_base 23: mod_base = OTHER; note = 2'-O-methyluridine
  misc_feature 1..4: note = RNA
  misc_feature 6..23: note = RNA
  misc_feature 5: note = DNA
atggacattggccgggaggcatt

SEQ ID NO: 893 - DNA, 23 bp, synthetic construct
  source 1..23: mol_type = other DNA
  modified_base 1: mod_base = OTHER; note = 2'-O-methyladenosine-3'-phosphorothioate
  modified_base 2: mod_base = OTHER; note = 2'-deoxy-2'-fluoroadenosine-3'-phosphorothioate
  modified_base 3: mod_base = OTHER; note = 2'-O-methylguanosine-3'-phosphate
  modified_base 4: mod_base = OTHER; note = 2'-O-methyladenosine-3'-phosphate
  modified_base 6: mod_base = OTHER; note = 2'-O-methylguanosine-3'-phosphate
  modified_base 7: mod_base = OTHER; note = Adenosine-glycol nucleic acid (GNA), S-isomer
  modified_base 8: mod_base = OTHER; note = 2'-O-methylguanosine-3'-phosphate
  modified_base 9: mod_base = OTHER; note = 2'-O-methylcytidine-3'-phosphate
  modified_base 10: mod_base = OTHER; note = 2'-O-methyluridine-3'-phosphate
  modified_base 11: mod_base = OTHER; note = 2'-O-methylguanosine-3'-phosphate
  modified_base 12: mod_base = OTHER; note = 2'-O-methylguanosine-3'-phosphate
  modified_base 13: mod_base = OTHER; note = 2'-O-methyluridine-3'-phosphate
  modified_base 14: mod_base = OTHER; note = 2'-deoxy-2'-fluoroguanosine-3'-phosphate
  modified_base 15: mod_base = OTHER; note = 2'-O-methylguanosine-3'-phosphate
  modified_base 16: mod_base = OTHER; note = 2'-deoxy-2'-fluoroadenosine-3'-phosphate
  modified_base 17: mod_base = OTHER; note = 2'-O-methylcytidine-3'-phosphate
  modified_base 18: mod_base = OTHER; note = 2'-O-methyladenosine-3'-phosphate
  modified_base 19: mod_base = OTHER; note = 2'-O-methyluridine-3'-phosphate
  modified_base 20: mod_base = OTHER; note = 2'-O-methyluridine-3'-phosphate
  modified_base 21: mod_base = OTHER; note = 2'-O-methylguanosine-3'-phosphorothioate
  modified_base 22: mod_base = OTHER; note = 2'-O-methylguanosine-3'-phosphorothioate
  modified_base 23: mod_base = OTHER; note = 2'-O-methylcytidine
  misc_feature 1..4: note = RNA
  misc_feature 6..23: note = RNA
  misc_feature 5: note = DNA
aagatgagctggtggacattggc

SEQ ID NO: 894 - RNA, 23 nt, synthetic construct
  source 1..23: mol_type = other RNA
  modified_base 1: mod_base = OTHER; note = 2'-O-methyladenosine-3'-phosphorothioate
  modified_base 2: mod_base = OTHER; note = 2'-deoxy-2'-fluoroguanosine-3'-phosphorothioate
  modified_base 3: mod_base = OTHER; note = 2'-O-methyladenosine-3'-phosphate
  modified_base 4: mod_base = OTHER; note = 2'-O-methylguanosine-3'-phosphate
  modified_base 5: mod_base = OTHER; note = 2'-O-methyladenosine-3'-phosphate
  modified_base 6: mod_base = OTHER; note = 2'-deoxy-2'-fluorouridine-3'-phosphate
  modified_base 7: mod_base = OTHER; note = 2'-O-methylguanosine-3'-phosphate
  modified_base 8: mod_base = OTHER; note = 2'-O-methyladenosine-3'-phosphate
  modified_base 9: mod_base = OTHER; note = 2'-O-methylguanosine-3'-phosphate
  modified_base 10: mod_base = OTHER; note = 2'-O-methylcytidine-3'-phosphate
  modified_base 11: mod_base = OTHER; note = 2'-O-methyluridine-3'-phosphate
  modified_base 12: mod_base = OTHER; note = 2'-O-methylguanosine-3'-phosphate
  modified_base 13: mod_base = OTHER; note = 2'-O-methylguanosine-3'-phosphate
  modified_base 14: mod_base = OTHER; note = 2'-deoxy-2'-fluorouridine-3'-phosphate
  modified_base 15: mod_base = OTHER; note = 2'-O-methylguanosine-3'-phosphate
  modified_base 16: mod_base = OTHER; note = 2'-deoxy-2'-fluoroguanosine-3'-phosphate
  modified_base 17: mod_base = OTHER; note = 2'-O-methyladenosine-3'-phosphate
  modified_base 18: mod_base = OTHER; note = 2'-O-methylcytidine-3'-phosphate
  modified_base 19: mod_base = OTHER; note = 2'-O-methyladenosine-3'-phosphate
  modified_base 20: mod_base = OTHER; note = 2'-O-methyluridine-3'-phosphate
  modified_base 21: mod_base = OTHER; note = 2'-O-methyluridine-3'-phosphorothioate
  modified_base 22: mod_base = OTHER; note = 2'-O-methylguanosine-3'-phosphorothioate
  modified_base 23: mod_base = OTHER; note = 2'-O-methylguanosine
agagatgagctggtggacattgg

SEQ ID NO: 895 - RNA, 23 nt, synthetic construct
  source 1..23: mol_type = other RNA
  modified_base 1: mod_base = OTHER; note = 2'-O-methyladenosine-3'-phosphorothioate
  modified_base 2: mod_base = OTHER; note = 2'-deoxy-2'-fluorocytidine-3'-phosphorothioate
  modified_base 3: mod_base = OTHER; note = 2'-O-methylcytidine-3'-phosphate
  modified_base 4: mod_base = OTHER; note = 2'-O-methyladenosine-3'-phosphate
  modified_base 5: mod_base = OTHER; note = 2'-O-methylcytidine-3'-phosphate
  modified_base 6: mod_base = OTHER; note = 2'-deoxy-2'-fluoroguanosine-3'-phosphate
  modified_base 7: mod_base = OTHER; note = 2'-O-methyladenosine-3'-phosphate
  modified_base 8: mod_base = OTHER; note = 2'-O-methylcytidine-3'-phosphate
  modified_base 9: mod_base = OTHER; note = 2'-O-methyluridine-3'-phosphate
  modified_base 10: mod_base = OTHER; note = 2'-O-methyluridine-3'-phosphate
  modified_base 11: mod_base = OTHER; note = 2'-O-methylcytidine-3'-phosphate
  modified_base 12: mod_base = OTHER; note = 2'-O-methylguanosine-3'-phosphate
  modified_base 13: mod_base = OTHER; note = 2'-O-methyluridine-3'-phosphate
  modified_base 14: mod_base = OTHER; note = 2'-deoxy-2'-fluorocytidine-3'-phosphate
  modified_base 15: mod_base = OTHER; note = 2'-O-methyluridine-3'-phosphate
  modified_base 16: mod_base = OTHER; note = 2'-deoxy-2'-fluorouridine-3'-phosphate
  modified_base 17: mod_base = OTHER; note = 2'-O-methyluridine-3'-phosphate
  modified_base 18: mod_base = OTHER; note = 2'-O-methylguanosine-3'-phosphate
  modified_base 19: mod_base = OTHER; note = 2'-O-methylguanosine-3'-phosphate
  modified_base 20: mod_base = OTHER; note = 2'-O-methyladenosine-3'-phosphate
  modified_base 21: mod_base = OTHER; note = 2'-O-methylcytidine-3'-phosphorothioate
  modified_base 22: mod_base = OTHER; note = 2'-O-methylcytidine-3'-phosphorothioate
  modified_base 23: mod_base = OTHER; note = 2'-O-methylguanosine
accacgacttcgtctttggaccg

SEQ ID NO: 896 - RNA, 23 nt, synthetic construct
  source 1..23: mol_type = other RNA
  modified_base 1: mod_base = OTHER; note = 2'-O-methyladenosine-3'-phosphorothioate
  modified_base 2: mod_base = OTHER; note = 2'-deoxy-2'-fluorouridine-3'-phosphorothioate
  modified_base 3: mod_base = OTHER; note = 2'-O-methylcytidine-3'-phosphate
  modified_base 4: mod_base = OTHER; note = 2'-O-methylcytidine-3'-phosphate
  modified_base 5: mod_base = OTHER; note = 2'-O-methyladenosine-3'-phosphate
  modified_base 6: mod_base = OTHER; note = 2'-deoxy-2'-fluorocytidine-3'-phosphate
  modified_base 7: mod_base = OTHER; note = 2'-O-methylguanosine-3'-phosphate
  modified_base 8: mod_base = OTHER; note = 2'-O-methyladenosine-3'-phosphate
  modified_base 9: mod_base = OTHER; note = 2'-O-methylcytidine-3'-phosphate
  modified_base 10: mod_base = OTHER; note = 2'-O-methyluridine-3'-phosphate
  modified_base 11: mod_base = OTHER; note = 2'-O-methyluridine-3'-phosphate
  modified_base 12: mod_base = OTHER; note = 2'-O-methylcytidine-3'-phosphate
  modified_base 13: mod_base = OTHER; note = 2'-O-methylguanosine-3'-phosphate
  modified_base 14: mod_base = OTHER; note = 2'-deoxy-2'-fluorouridine-3'-phosphate
  modified_base 15: mod_base = OTHER; note = 2'-O-methylcytidine-3'-phosphate
  modified_base 16: mod_base = OTHER; note = 2'-deoxy-2'-fluorouridine-3'-phosphate
  modified_base 17: mod_base = OTHER; note = 2'-O-methyluridine-3'-phosphate
  modified_base 18: mod_base = OTHER; note = 2'-O-methyluridine-3'-phosphate
  modified_base 19: mod_base = OTHER; note = 2'-O-methylguanosine-3'-phosphate
  modified_base 20: mod_base = OTHER; note = 2'-O-methylguanosine-3'-phosphate
  modified_base 21: mod_base = OTHER; note = 2'-O-methyladenosine-3'-phosphorothioate
  modified_base 22: mod_base = OTHER; note = 2'-O-methylcytidine-3'-phosphorothioate
  modified_base 23: mod_base = OTHER; note = 2'-O-methylcytidine
atccacgacttcgtctttggacc

SEQ ID NO: 897 - RNA, 23 nt, synthetic construct
  source 1..23: mol_type = other RNA
  modified_base 1: mod_base = OTHER; note = 2'-O-methyladenosine-3'-phosphorothioate
  modified_base 2: mod_base = OTHER; note = 2'-deoxy-2'-fluoroadenosine-3'-phosphorothioate
  modified_base 3: mod_base = OTHER; note = 2'-O-methyluridine-3'-phosphate
  modified_base 4: mod_base = OTHER; note = 2'-O-methylcytidine-3'-phosphate
  modified_base 5: mod_base = OTHER; note = 2'-O-methylcytidine-3'-phosphate
  modified_base 6: mod_base = OTHER; note = 2'-deoxy-2'-fluoroadenosine-3'-phosphate
  modified_base 7: mod_base = OTHER; note = 2'-O-methylcytidine-3'-phosphate
  modified_base 8: mod_base = OTHER; note = 2'-O-methylguanosine-3'-phosphate
  modified_base 9: mod_base = OTHER; note = 2'-O-methyladenosine-3'-phosphate
  modified_base 10: mod_base = OTHER; note = 2'-O-methylcytidine-3'-phosphate
  modified_base 11: mod_base = OTHER; note = 2'-O-methyluridine-3'-phosphate
  modified_base 12: mod_base = OTHER; note = 2'-O-methyluridine-3'-phosphate
  modified_base 13: mod_base = OTHER; note = 2'-O-methylcytidine-3'-phosphate
  modified_base 14: mod_base = OTHER; note = 2'-deoxy-2'-fluoroguanosine-3'-phosphate
  modified_base 15: mod_base = OTHER; note = 2'-O-methyluridine-3'-phosphate
  modified_base 16: mod_base = OTHER; note = 2'-deoxy-2'-fluorocytidine-3'-phosphate
  modified_base 17: mod_base = OTHER; note = 2'-O-methyluridine-3'-phosphate
  modified_base 18: mod_base = OTHER; note = 2'-O-methyluridine-3'-phosphate
  modified_base 19: mod_base = OTHER; note = 2'-O-methyluridine-3'-phosphate
  modified_base 20: mod_base = OTHER; note = 2'-O-methylguanosine-3'-phosphate
  modified_base 21: mod_base = OTHER; note = 2'-O-methylguanosine-3'-phosphorothioate
  modified_base 22: mod_base = OTHER; note = 2'-O-methyladenosine-3'-phosphorothioate
  modified_base 23: mod_base = OTHER; note = 2'-O-methylcytidine
aatccacgacttcgtctttggac

SEQ ID NO: 898 - RNA, 23 nt, synthetic construct
  source 1..23: mol_type = other RNA
  modified_base 1: mod_base = OTHER; note = 2'-O-methyladenosine-3'-phosphorothioate
  modified_base 2: mod_base = OTHER; note = 2'-deoxy-2'-fluorocytidine-3'-phosphorothioate
  modified_base 3: mod_base = OTHER; note = 2'-O-methyladenosine-3'-phosphate
  modified_base 4: mod_base = OTHER; note = 2'-O-methyluridine-3'-phosphate
  modified_base 5: mod_base = OTHER; note = 2'-O-methylcytidine-3'-phosphate
  modified_base 6: mod_base = OTHER; note = 2'-deoxy-2'-fluorocytidine-3'-phosphate
  modified_base 7: mod_base = OTHER; note = 2'-O-methyladenosine-3'-phosphate
  modified_base 8: mod_base = OTHER; note = 2'-O-methylcytidine-3'-phosphate
  modified_base 9: mod_base = OTHER; note = 2'-O-methylguanosine-3'-phosphate
  modified_base 10: mod_base = OTHER; note = 2'-O-methyladenosine-3'-phosphate
  modified_base 11: mod_base = OTHER; note = 2'-O-methylcytidine-3'-phosphate
  modified_base 12: mod_base = OTHER; note = 2'-O-methyluridine-3'-phosphate
  modified_base 13: mod_base = OTHER; note = 2'-O-methyluridine-3'-phosphate
  modified_base 14: mod_base = OTHER; note = 2'-deoxy-2'-fluorocytidine-3'-phosphate
  modified_base 15: mod_base = OTHER; note = 2'-O-methylguanosine-3'-phosphate
  modified_base 16: mod_base = OTHER; note = 2'-deoxy-2'-fluorouridine-3'-phosphate
  modified_base 17: mod_base = OTHER; note = 2'-O-methylcytidine-3'-phosphate
  modified_base 18: mod_base = OTHER; note = 2'-O-methyluridine-3'-phosphate
  modified_base 19: mod_base = OTHER; note = 2'-O-methyluridine-3'-phosphate
  modified_base 20: mod_base = OTHER; note = 2'-O-methyluridine-3'-phosphate
  modified_base 21: mod_base = OTHER; note = 2'-O-methylguanosine-3'-phosphorothioate
  modified_base 22: mod_base = OTHER; note = 2'-O-methylguanosine-3'-phosphorothioate
  modified_base 23: mod_base = OTHER; note = 2'-O-methyladenosine
acatccacgacttcgtctttgga

SEQ ID NO: 899 - DNA, 23 bp, synthetic construct
  source 1..23: mol_type = other DNA
  modified_base 1: mod_base = OTHER; note = 2'-O-methyladenosine-3'-phosphorothioate
  modified_base 2: mod_base = OTHER; note = 2'-deoxy-2'-fluoroadenosine-3'-phosphorothioate
  modified_base 3: mod_base = OTHER; note = 2'-O-methylguanosine-3'-phosphate
  modified_base 4: mod_base = OTHER; note = 2'-O-methylguanosine-3'-phosphate
  modified_base 6: mod_base = OTHER; note = 2'-O-methyladenosine-3'-phosphate
  modified_base 7: mod_base = OTHER; note = Thymidine-glycol nucleic acid (GNA), S-Isomer
  modified_base 8: mod_base = OTHER; note = 2'-O-methylcytidine-3'-phosphate
  modified_base 9: mod_base = OTHER; note = 2'-O-methylcytidine-3'-phosphate
  modified_base 10: mod_base = OTHER; note = 2'-O-methyladenosine-3'-phosphate
  modified_base 11: mod_base = OTHER; note = 2'-O-methylcytidine-3'-phosphate
  modified_base 12: mod_base = OTHER; note = 2'-O-methylguanosine-3'-phosphate
  modified_base 13: mod_base = OTHER; note = 2'-O-methyladenosine-3'-phosphate
  modified_base 14: mod_base = OTHER; note = 2'-deoxy-2'-fluorocytidine-3'-phosphate
  modified_base 15: mod_base = OTHER; note = 2'-O-methyluridine-3'-phosphate
  modified_base 16: mod_base = OTHER; note = 2'-deoxy-2'-fluorouridine-3'-phosphate
  modified_base 17: mod_base = OTHER; note = 2'-O-methylcytidine-3'-phosphate
  modified_base 18: mod_base = OTHER; note = 2'-O-methylguanosine-3'-phosphate
  modified_base 19: mod_base = OTHER; note = 2'-O-methyluridine-3'-phosphate
  modified_base 20: mod_base = OTHER; note = 2'-O-methylcytidine-3'-phosphate
  modified_base 21: mod_base = OTHER; note = 2'-O-methyluridine-3'-phosphorothioate
  modified_base 22: mod_base = OTHER; note = 2'-O-methyluridine-3'-phosphorothioate
  modified_base 23: mod_base = OTHER; note = 2'-O-methyluridine
  misc_feature 1..4: note = RNA
  misc_feature 6..23: note = RNA
  misc_feature 5: note = DNA
aaggcatccacgacttcgtcttt

SEQ ID NO: 900 - RNA, 23 nt, synthetic construct
  source 1..23: mol_type = other RNA
  modified_base 1: mod_base = OTHER; note = 2'-O-methyladenosine-3'-phosphorothioate
  modified_base 2: mod_base = OTHER; note = 2'-deoxy-2'-fluoroguanosine-3'-phosphorothioate
  modified_base 3: mod_base = OTHER; note = 2'-O-methylguanosine-3'-phosphate
  modified_base 4: mod_base = OTHER; note = 2'-O-methyladenosine-3'-phosphate
  modified_base 5: mod_base = OTHER; note = 2'-O-methyluridine-3'-phosphate
  modified_base 6: mod_base = OTHER; note = 2'-deoxy-2'-fluoroadenosine-3'-phosphate
  modified_base 7: mod_base = OTHER; note = 2'-O-methyladenosine-3'-phosphate
  modified_base 8: mod_base = OTHER; note = 2'-O-methylguanosine-3'-phosphate
  modified_base 9: mod_base = OTHER; note = 2'-O-methylguanosine-3'-phosphate
  modified_base 10: mod_base = OTHER; note = 2'-O-methylcytidine-3'-phosphate
  modified_base 11: mod_base = OTHER; note = 2'-O-methylcytidine-3'-phosphate
  modified_base 12: mod_base = OTHER; note = 2'-O-methyladenosine-3'-phosphate
  modified_base 13: mod_base = OTHER; note = 2'-O-methylcytidine-3'-phosphate
  modified_base 14: mod_base = OTHER; note = 2'-deoxy-2'-fluorouridine-3'-phosphate
  modified_base 15: mod_base = OTHER; note = 2'-O-methylguanosine-3'-phosphate
  modified_base 16: mod_base = OTHER; note = 2'-deoxy-2'-fluorouridine-3'-phosphate
  modified_base 17: mod_base = OTHER; note = 2'-O-methyladenosine-3'-phosphate
  modified_base 18: mod_base = OTHER; note = 2'-O-methylguanosine-3'-phosphate
  modified_base 19: mod_base = OTHER; note = 2'-O-methyladenosine-3'-phosphate
  modified_base 20: mod_base = OTHER; note = 2'-O-methyladenosine-3'-phosphate
  modified_base 21: mod_base = OTHER; note = 2'-O-methylguanosine-3'-phosphorothioate
  modified_base 22: mod_base = OTHER; note = 2'-O-methylguanosine-3'-phosphorothioate
  modified_base 23: mod_base = OTHER; note = 2'-O-methylguanosine
aggataaggccactgtagaaggg

SEQ ID NO: 901 - RNA, 23 nt, synthetic construct
  source 1..23: mol_type = other RNA
  modified_base 1: mod_base = OTHER; note = 2'-O-methyladenosine-3'-phosphorothioate
  modified_base 2: mod_base = OTHER; note = 2'-deoxy-2'-fluoroguanosine-3'-phosphorothioate
  modified_base 3: mod_base = OTHER; note = 2'-O-methylguanosine-3'-phosphate
  modified_base 4: mod_base = OTHER; note = 2'-O-methylguanosine-3'-phosphate
  modified_base 5: mod_base = OTHER; note = 2'-O-methyladenosine-3'-phosphate
  modified_base 6: mod_base = OTHER; note = 2'-deoxy-2'-fluorouridine-3'-phosphate
  modified_base 7: mod_base = OTHER; note = 2'-O-methyladenosine-3'-phosphate
  modified_base 8: mod_base = OTHER; note = 2'-O-methyladenosine-3'-phosphate
  modified_base 9: mod_base = OTHER; note = 2'-O-methylguanosine-3'-phosphate
  modified_base 10: mod_base = OTHER; note = 2'-O-methylguanosine-3'-phosphate
  modified_base 11: mod_base = OTHER; note = 2'-O-methylcytidine-3'-phosphate
  modified_base 12: mod_base = OTHER; note = 2'-O-methylcytidine-3'-phosphate
  modified_base 13: mod_base = OTHER; note = 2'-O-methyladenosine-3'-phosphate
  modified_base 14: mod_base = OTHER; note = 2'-deoxy-2'-fluorocytidine-3'-phosphate
  modified_base 15: mod_base = OTHER; note = 2'-O-methyluridine-3'-phosphate
  modified_base 16: mod_base = OTHER; note = 2'-deoxy-2'-fluoroguanosine-3'-phosphate
  modified_base 17: mod_base = OTHER; note = 2'-O-methyluridine-3'-phosphate
  modified_base 18: mod_base = OTHER; note = 2'-O-methyladenosine-3'-phosphate
  modified_base 19: mod_base = OTHER; note = 2'-O-methylguanosine-3'-phosphate
  modified_base 20: mod_base = OTHER; note = 2'-O-methyladenosine-3'-phosphate
  modified_base 21: mod_base = OTHER; note = 2'-O-methyladenosine-3'-phosphorothioate
  modified_base 22: mod_base = OTHER; note = 2'-O-methylguanosine-3'-phosphorothioate
  modified_base 23: mod_base = OTHER; note = 2'-O-methylguanosine
agggataaggccactgtagaagg

SEQ ID NO: 902 - RNA, 23 nt, synthetic construct
  source 1..23: mol_type = other RNA
  modified_base 1: mod_base = OTHER; note = 2'-O-methyladenosine-3'-phosphorothioate
  modified_base 2: mod_base = OTHER; note = 2'-deoxy-2'-fluoroadenosine-3'-phosphorothioate
  modified_base 3: mod_base = OTHER; note = 2'-O-methylguanosine-3'-phosphate
  modified_base 4: mod_base = OTHER; note = 2'-O-methylguanosine-3'-phosphate
  modified_base 5: mod_base = OTHER; note = 2'-O-methylguanosine-3'-phosphate
  modified_base 6: mod_base = OTHER; note = 2'-deoxy-2'-fluoroadenosine-3'-phosphate
  modified_base 7: mod_base = OTHER; note = 2'-O-methyluridine-3'-phosphate
  modified_base 8: mod_base = OTHER; note = 2'-O-methyladenosine-3'-phosphate
  modified_base 9: mod_base = OTHER; note = 2'-O-methyladenosine-3'-phosphate
  modified_base 10: mod_base = OTHER; note = 2'-O-methylguanosine-3'-phosphate
  modified_base 11: mod_base = OTHER; note = 2'-O-methylguanosine-3'-phosphate
  modified_base 12: mod_base = OTHER; note = 2'-O-methylcytidine-3'-phosphate
  modified_base 13: mod_base = OTHER; note = 2'-O-methylcytidine-3'-phosphate
  modified_base 14: mod_base = OTHER; note = 2'-deoxy-2'-fluoroadenosine-3'-phosphate
  modified_base 15: mod_base = OTHER; note = 2'-O-methylcytidine-3'-phosphate
  modified_base 16: mod_base = OTHER; note = 2'-deoxy-2'-fluorouridine-3'-phosphate
  modified_base 17: mod_base = OTHER; note = 2'-O-methylguanosine-3'-phosphate
  modified_base 18: mod_base = OTHER; note = 2'-O-methyluridine-3'-phosphate
  modified_base 19: mod_base = OTHER; note = 2'-O-methyladenosine-3'-phosphate
  modified_base 20: mod_base = OTHER; note = 2'-O-methylguanosine-3'-phosphate
  modified_base 21: mod_base = OTHER; note = 2'-O-methyladenosine-3'-phosphorothioate
  modified_base 22: mod_base = OTHER; note = 2'-O-methyladenosine-3'-phosphorothioate
  modified_base 23: mod_base = OTHER; note = 2'-O-methylguanosine
aagggataaggccactgtagaag

SEQ ID NO: 903 - DNA, 23 bp, synthetic construct
  source 1..23: mol_type = other DNA
  modified_base 1: mod_base = OTHER; note = 2'-O-methyladenosine-3'-phosphorothioate
  modified_base 2: mod_base = OTHER; note = 2'-deoxy-2'-fluoroguanosine-3'-phosphorothioate
  modified_base 3: mod_base = OTHER; note = 2'-O-methyladenosine-3'-phosphate
  modified_base 4: mod_base = OTHER; note = 2'-O-methylguanosine-3'-phosphate
  modified_base 6: mod_base = OTHER; note = 2'-O-methylguanosine-3'-phosphate
  modified_base 7: mod_base = OTHER; note = Adenosine-glycol nucleic acid (GNA), S-isomer
  modified_base 8: mod_base = OTHER; note = 2'-O-methyluridine-3'-phosphate
  modified_base 9: mod_base = OTHER; note = 2'-O-methyladenosine-3'-phosphate
  modified_base 10: mod_base = OTHER; note = 2'-O-methyladenosine-3'-phosphate
  modified_base 11: mod_base = OTHER; note = 2'-O-methylguanosine-3'-phosphate
  modified_base 12: mod_base = OTHER; note = 2'-O-methylguanosine-3'-phosphate
  modified_base 13: mod_base = OTHER; note = 2'-O-methylcytidine-3'-phosphate
  modified_base 14: mod_base = OTHER; note = 2'-deoxy-2'-fluorocytidine-3'-phosphate
  modified_base 15: mod_base = OTHER; note = 2'-O-methyladenosine-3'-phosphate
  modified_base 16: mod_base = OTHER; note = 2'-deoxy-2'-fluorocytidine-3'-phosphate
  modified_base 17: mod_base = OTHER; note = 2'-O-methyluridine-3'-phosphate
  modified_base 18: mod_base = OTHER; note = 2'-O-methylguanosine-3'-phosphate
  modified_base 19: mod_base = OTHER; note = 2'-O-methyluridine-3'-phosphate
  modified_base 20: mod_base = OTHER; note = 2'-O-methyladenosine-3'-phosphate
  modified_base 21: mod_base = OTHER; note = 2'-O-methylguanosine-3'-phosphorothioate
  modified_base 22: mod_base = OTHER; note = 2'-O-methyladenosine-3'-phosphorothioate
  modified_base 23: mod_base = OTHER; note = 2'-O-methyladenosine
  misc_feature 1..4: note = RNA
  misc_feature 6..23: note = RNA
  misc_feature 5: note = DNA
agagggataaggccactgtagaa

SEQ ID NO: 904 - DNA, 23 bp, synthetic construct
  source 1..23: mol_type = other DNA
  modified_base 1: mod_base = OTHER; note = 2'-O-methyladenosine-3'-phosphorothioate
  modified_base 2: mod_base = OTHER; note = 2'-deoxy-2'-fluoroguanosine-3'-phosphorothioate
  modified_base 3: mod_base = OTHER; note = 2'-O-methyladenosine-3'-phosphate
  modified_base 4: mod_base = OTHER; note = 2'-O-methyladenosine-3'-phosphate
  modified_base 6: mod_base = OTHER; note = 2'-O-methylguanosine-3'-phosphate
  modified_base 7: mod_base = OTHER; note = Adenosine-glycol nucleic acid (GNA), S-isomer
  modified_base 8: mod_base = OTHER; note = 2'-O-methylguanosine-3'-phosphate
  modified_base 9: mod_base = OTHER; note = 2'-O-methylguanosine-3'-phosphate
  modified_base 10: mod_base = OTHER; note = 2'-O-methylguanosine-3'-phosphate
  modified_base 11: mod_base = OTHER; note = 2'-O-methyladenosine-3'-phosphate
  modified_base 12: mod_base = OTHER; note = 2'-O-methyluridine-3'-phosphate
  modified_base 13: mod_base = OTHER; note = 2'-O-methyladenosine-3'-phosphate
  modified_base 14: mod_base = OTHER; note = 2'-deoxy-2'-fluoroadenosine-3'-phosphate
  modified_base 15: mod_base = OTHER; note = 2'-O-methylguanosine-3'-phosphate
  modified_base 16: mod_base = OTHER; note = 2'-deoxy-2'-fluoroguanosine-3'-phosphate
  modified_base 17: mod_base = OTHER; note = 2'-O-methylcytidine-3'-phosphate
  modified_base 18: mod_base = OTHER; note = 2'-O-methylcytidine-3'-phosphate
  modified_base 19: mod_base = OTHER; note = 2'-O-methyladenosine-3'-phosphate
  modified_base 20: mod_base = OTHER; note = 2'-O-methylcytidine-3'-phosphate
  modified_base 21: mod_base = OTHER; note = 2'-O-methyluridine-3'-phosphorothioate
  modified_base 22: mod_base = OTHER; note = 2'-O-methylguanosine-3'-phosphorothioate
  modified_base 23: mod_base = OTHER; note = 2'-O-methyluridine
  misc_feature 1..4: note = RNA
  misc_feature 6..23: note = RNA
  misc_feature 5: note = DNA
agaaggagggataaggccactgt

SEQ ID NO: 905 - RNA, 23 nt, synthetic construct
  source 1..23: mol_type = other RNA
  modified_base 1: mod_base = OTHER; note = 2'-O-methyladenosine-3'-phosphorothioate
  modified_base 2: mod_base = OTHER; note = 2'-deoxy-2'-fluoroadenosine-3'-phosphorothioate
  modified_base 3: mod_base = OTHER; note = 2'-O-methylguanosine-3'-phosphate
  modified_base 4: mod_base = OTHER; note = 2'-O-methylguanosine-3'-phosphate
  modified_base 5: mod_base = OTHER; note = 2'-O-methyladenosine-3'-phosphate
  modified_base 6: mod_base = OTHER; note = 2'-deoxy-2'-fluoroadenosine-3'-phosphate
  modified_base 7: mod_base = OTHER; note = 2'-O-methylguanosine-3'-phosphate
  modified_base 8: mod_base = OTHER; note = 2'-O-methylguanosine-3'-phosphate
  modified_base 9: mod_base = OTHER; note = 2'-O-methyladenosine-3'-phosphate
  modified_base 10: mod_base = OTHER; note = 2'-O-methylguanosine-3'-phosphate
  modified_base 11: mod_base = OTHER; note = 2'-O-methylguanosine-3'-phosphate
  modified_base 12: mod_base = OTHER; note = 2'-O-methylguanosine-3'-phosphate
  modified_base 13: mod_base = OTHER; note = 2'-O-methyladenosine-3'-phosphate
  modified_base 14: mod_base = OTHER; note = 2'-deoxy-2'-fluorouridine-3'-phosphate
  modified_base 15: mod_base = OTHER; note = 2'-O-methyladenosine-3'-phosphate
  modified_base 16: mod_base = OTHER; note = 2'-deoxy-2'-fluoroadenosine-3'-phosphate
  modified_base 17: mod_base = OTHER; note = 2'-O-methylguanosine-3'-phosphate
  modified_base 18: mod_base = OTHER; note = 2'-O-methylguanosine-3'-phosphate
  modified_base 19: mod_base = OTHER; note = 2'-O-methylcytidine-3'-phosphate
  modified_base 20: mod_base = OTHER; note = 2'-O-methylcytidine-3'-phosphate
  modified_base 21: mod_base = OTHER; note = 2'-O-methyladenosine-3'-phosphorothioate
  modified_base 22: mod_base = OTHER; note = 2'-O-methylcytidine-3'-phosphorothioate
  modified_base 23: mod_base = OTHER; note = 2'-O-methyluridine
aaggaaggagggataaggccact

SEQ ID NO: 906 - RNA, 23 nt, synthetic construct
  source 1..23: mol_type = other RNA
  modified_base 1: mod_base = OTHER; note = 2'-O-methyladenosine-3'-phosphorothioate
  modified_base 2: mod_base = OTHER; note = 2'-deoxy-2'-fluorocytidine-3'-phosphorothioate
  modified_base 3: mod_base = OTHER; note = 2'-O-methyluridine-3'-phosphate
  modified_base 4: mod_base = OTHER; note = 2'-O-methylguanosine-3'-phosphate
  modified_base 5: mod_base = OTHER; note = 2'-O-methyladenosine-3'-phosphate
  modified_base 6: mod_base = OTHER; note = 2'-deoxy-2'-fluoroadenosine-3'-phosphate
  modified_base 7: mod_base = OTHER; note = 2'-O-methylguanosine-3'-phosphate
  modified_base 8: mod_base = OTHER; note = 2'-O-methylguanosine-3'-phosphate
  modified_base 9: mod_base = OTHER; note = 2'-O-methyladenosine-3'-phosphate
  modified_base 10: mod_base = OTHER; note = 2'-O-methyladenosine-3'-phosphate
  modified_base 11: mod_base = OTHER; note = 2'-O-methylguanosine-3'-phosphate
  modified_base 12: mod_base = OTHER; note = 2'-O-methylguanosine-3'-phosphate
  modified_base 13: mod_base = OTHER; note = 2'-O-methyladenosine-3'-phosphate
  modified_base 14: mod_base = OTHER; note = 2'-deoxy-2'-fluoroguanosine-3'-phosphate
  modified_base 15: mod_base = OTHER; note = 2'-O-methylguanosine-3'-phosphate
  modified_base 16: mod_base = OTHER; note = 2'-deoxy-2'-fluoroguanosine-3'-phosphate
  modified_base 17: mod_base = OTHER; note = 2'-O-methyladenosine-3'-phosphate
  modified_base 18: mod_base = OTHER; note = 2'-O-methyluridine-3'-phosphate
  modified_base 19: mod_base = OTHER; note = 2'-O-methyladenosine-3'-phosphate
  modified_base 20: mod_base = OTHER; note = 2'-O-methyladenosine-3'-phosphate
  modified_base 21: mod_base = OTHER; note = 2'-O-methylguanosine-3'-phosphorothioate
  modified_base 22: mod_base = OTHER; note = 2'-O-methylguanosine-3'-phosphorothioate
  modified_base 23: mod_base = OTHER; note = 2'-O-methylcytidine
actgaaggaaggagggataaggc

SEQ ID NO: 907 - DNA, 23 bp, synthetic construct
  source 1..23: mol_type = other DNA
  modified_base 1: mod_base = OTHER; note = 2'-O-methyladenosine-3'-phosphorothioate
  modified_base 2: mod_base = OTHER; note = 2'-deoxy-2'-fluorouridine-3'-phosphorothioate
  modified_base 3: mod_base = OTHER; note = 2'-O-methylcytidine-3'-phosphate
  modified_base 4: mod_base = OTHER; note = 2'-O-methyluridine-3'-phosphate
  modified_base 6: mod_base = OTHER; note = 2'-O-methyladenosine-3'-phosphate
  modified_base 7: mod_base = OTHER; note = Adenosine-glycol nucleic acid (GNA), S-isomer
  modified_base 8: mod_base = OTHER; note = 2'-O-methylguanosine-3'-phosphate
  modified_base 9: mod_base = OTHER; note = 2'-O-methylguanosine-3'-phosphate
  modified_base 10: mod_base = OTHER; note = 2'-O-methyladenosine-3'-phosphate
  modified_base 11: mod_base = OTHER; note = 2'-O-methyladenosine-3'-phosphate
  modified_base 12: mod_base = OTHER; note = 2'-O-methylguanosine-3'-phosphate
  modified_base 13: mod_base = OTHER; note = 2'-O-methylguanosine-3'-phosphate
  modified_base 14: mod_base = OTHER; note = 2'-deoxy-2'-fluoroadenosine-3'-phosphate
  modified_base 15: mod_base = OTHER; note = 2'-O-methylguanosine-3'-phosphate
  modified_base 16: mod_base = OTHER; note = 2'-deoxy-2'-fluoroguanosine-3'-phosphate
  modified_base 17: mod_base = OTHER; note = 2'-O-methylguanosine-3'-phosphate
  modified_base 18: mod_base = OTHER; note = 2'-O-methyladenosine-3'-phosphate
  modified_base 19: mod_base = OTHER; note = 2'-O-methyluridine-3'-phosphate
  modified_base 20: mod_base = OTHER; note = 2'-O-methyladenosine-3'-phosphate
  modified_base 21: mod_base = OTHER; note = 2'-O-methyladenosine-3'-phosphorothioate
  modified_base 22: mod_base = OTHER; note = 2'-O-methylguanosine-3'-phosphorothioate
  modified_base 23: mod_base = OTHER; note = 2'-O-methylguanosine
  misc_feature 1..4: note = RNA
  misc_feature 6..23: note = RNA
  misc_feature 5: note = DNA
atctgaaggaaggagggataagg

SEQ ID NO: 908 - RNA, 23 nt, synthetic construct
  source 1..23: mol_type = other RNA
  modified_base 1: mod_base = OTHER; note = 2'-O-methyladenosine-3'-phosphorothioate
  modified_base 2: mod_base = OTHER; note = 2'-deoxy-2'-fluorocytidine-3'-phosphorothioate
  modified_base 3: mod_base = OTHER; note = 2'-O-methylguanosine-3'-phosphate
  modified_base 4: mod_base = OTHER; note = 2'-O-methylcytidine-3'-phosphate
  modified_base 5: mod_base = OTHER; note = 2'-O-methylcytidine-3'-phosphate
  modified_base 6: mod_base = OTHER; note = 2'-deoxy-2'-fluorouridine-3'-phosphate
  modified_base 7: mod_base = OTHER; note = 2'-O-methylcytidine-3'-phosphate
  modified_base 8: mod_base = OTHER; note = 2'-O-methyluridine-3'-phosphate
  modified_base 9: mod_base = OTHER; note = 2'-O-methylguanosine-3'-phosphate
  modified_base 10: mod_base = OTHER; note = 2'-O-methyladenosine-3'-phosphate
  modified_base 11: mod_base = OTHER; note = 2'-O-methyladenosine-3'-phosphate
  modified_base 12: mod_base = OTHER; note = 2'-O-methylguanosine-3'-phosphate
  modified_base 13: mod_base = OTHER; note = 2'-O-methylguanosine-3'-phosphate
  modified_base 14: mod_base = OTHER; note = 2'-deoxy-2'-fluoroadenosine-3'-phosphate
  modified_base 15: mod_base = OTHER; note = 2'-O-methyladenosine-3'-phosphate
  modified_base 16: mod_base = OTHER; note = 2'-deoxy-2'-fluoroguanosine-3'-phosphate
  modified_base 17: mod_base = OTHER; note = 2'-O-methylguanosine-3'-phosphate
  modified_base 18: mod_base = OTHER; note = 2'-O-methyladenosine-3'-phosphate
  modified_base 19: mod_base = OTHER; note = 2'-O-methylguanosine-3'-phosphate
  modified_base 20: mod_base = OTHER; note = 2'-O-methylguanosine-3'-phosphate
  modified_base 21: mod_base = OTHER; note = 2'-O-methylguanosine-3'-phosphorothioate
  modified_base 22: mod_base = OTHER; note = 2'-O-methyladenosine-3'-phosphorothioate
  modified_base 23: mod_base = OTHER; note = 2'-O-methyluridine
acgcctctgaaggaaggagggat

SEQ ID NO: 909 - RNA, 23 nt, synthetic construct
  source 1..23: mol_type = other RNA
  modified_base 1: mod_base = OTHER; note = 2'-O-methyladenosine-3'-phosphorothioate
  modified_base 2: mod_base = OTHER; note = 2'-deoxy-2'-fluoroadenosine-3'-phosphorothioate
  modified_base 3: mod_base = OTHER; note = 2'-O-methylcytidine-3'-phosphate
  modified_base 4: mod_base = OTHER; note = 2'-O-methylguanosine-3'-phosphate
  modified_base 5: mod_base = OTHER; note = 2'-O-methylcytidine-3'-phosphate
  modified_base 6: mod_base = OTHER; note = 2'-deoxy-2'-fluorocytidine-3'-phosphate
  modified_base 7: mod_base = OTHER; note = 2'-O-methyluridine-3'-phosphate
  modified_base 8: mod_base = OTHER; note = 2'-O-methylcytidine-3'-phosphate
  modified_base 9: mod_base = OTHER; note = 2'-O-methyluridine-3'-phosphate
  modified_base 10: mod_base = OTHER; note = 2'-O-methylguanosine-3'-phosphate
  modified_base 11: mod_base = OTHER; note = 2'-O-methyladenosine-3'-phosphate
  modified_base 12: mod_base = OTHER; note = 2'-O-methyladenosine-3'-phosphate
  modified_base 13: mod_base = OTHER; note = 2'-O-methylguanosine-3'-phosphate
  modified_base 14: mod_base = OTHER; note = 2'-deoxy-2'-fluoroguanosine-3'-phosphate
  modified_base 15: mod_base = OTHER; note = 2'-O-methyladenosine-3'-phosphate
  modified_base 16: mod_base = OTHER; note = 2'-deoxy-2'-fluoroadenosine-3'-phosphate
  modified_base 17: mod_base = OTHER; note = 2'-O-methylguanosine-3'-phosphate
  modified_base 18: mod_base = OTHER; note = 2'-O-methylguanosine-3'-phosphate
  modified_base 19: mod_base = OTHER; note = 2'-O-methyladenosine-3'-phosphate
  modified_base 20: mod_base = OTHER; note = 2'-O-methylguanosine-3'-phosphate
  modified_base 21: mod_base = OTHER; note = 2'-O-methylguanosine-3'-phosphorothioate
  modified_base 22: mod_base = OTHER; note = 2'-O-methylguanosine-3'-phosphorothioate
  modified_base 23: mod_base = OTHER; note = 2'-O-methyladenosine
aacgcctctgaaggaaggaggga

SEQ ID NO: 910 - DNA, 23 bp, synthetic construct
  source 1..23: mol_type = other DNA
  modified_base 1: mod_base = OTHER; note = 2'-O-methyladenosine-3'-phosphorothioate
  modified_base 2: mod_base = OTHER; note = 2'-deoxy-2'-fluoroadenosine-3'-phosphorothioate
  modified_base 3: mod_base = OTHER; note = 2'-O-methylcytidine-3'-phosphate
  modified_base 4: mod_base = OTHER; note = 2'-O-methylguanosine-3'-phosphate
  modified_base 6: mod_base = OTHER; note = 2'-O-methylcytidine-3'-phosphate
  modified_base 7: mod_base = OTHER; note = Thymidine-glycol nucleic acid (GNA), S-Isomer
  modified_base 8: mod_base = OTHER; note = 2'-O-methylcytidine-3'-phosphate
  modified_base 9: mod_base = OTHER; note = 2'-O-methyluridine-3'-phosphate
  modified_base 10: mod_base = OTHER; note = 2'-O-methylguanosine-3'-phosphate
  modified_base 11: mod_base = OTHER; note = 2'-O-methyladenosine-3'-phosphate
  modified_base 12: mod_base = OTHER; note = 2'-O-methyladenosine-3'-phosphate
  modified_base 13: mod_base = OTHER; note = 2'-O-methylguanosine-3'-phosphate
  modified_base 14: mod_base = OTHER; note = 2'-deoxy-2'-fluoroguanosine-3'-phosphate
  modified_base 15: mod_base = OTHER; note = 2'-O-methyladenosine-3'-phosphate
  modified_base 16: mod_base = OTHER; note = 2'-deoxy-2'-fluoroadenosine-3'-phosphate
  modified_base 17: mod_base = OTHER; note = 2'-O-methylguanosine-3'-phosphate
  modified_base 18: mod_base = OTHER; note = 2'-O-methylguanosine-3'-phosphate
  modified_base 19: mod_base = OTHER; note = 2'-O-methyladenosine-3'-phosphate
  modified_base 20: mod_base = OTHER; note = 2'-O-methylguanosine-3'-phosphate
  modified_base 21: mod_base = OTHER; note = 2'-O-methylguanosine-3'-phosphorothioate
  modified_base 22: mod_base = OTHER; note = 2'-O-methylguanosine-3'-phosphorothioate
  modified_base 23: mod_base = OTHER; note = 2'-O-methyladenosine
  misc_feature 1..4: note = RNA
  misc_feature 6..23: note = RNA
  misc_feature 5: note = DNA
aacgcctctgaaggaaggaggga

SEQ ID NO: 911 - RNA, 23 nt, synthetic construct
  source 1..23: mol_type = other RNA
  modified_base 1: mod_base = OTHER; note = 2'-O-methyladenosine-3'-phosphorothioate
  modified_base 2: mod_base = OTHER; note = 2'-deoxy-2'-fluorocytidine-3'-phosphorothioate
  modified_base 3: mod_base = OTHER; note = 2'-O-methylguanosine-3'-phosphate
  modified_base 4: mod_base = OTHER; note = 2'-O-methylcytidine-3'-phosphate
  modified_base 5: mod_base = OTHER; note = 2'-O-methyladenosine-3'-phosphate
  modified_base 6: mod_base = OTHER; note = 2'-deoxy-2'-fluorocytidine-3'-phosphate
  modified_base 7: mod_base = OTHER; note = 2'-O-methylguanosine-3'-phosphate
  modified_base 8: mod_base = OTHER; note = 2'-O-methylcytidine-3'-phosphate
  modified_base 9: mod_base = OTHER; note = 2'-O-methylcytidine-3'-phosphate
  modified_base 10: mod_base = OTHER; note = 2'-O-methyluridine-3'-phosphate
  modified_base 11: mod_base = OTHER; note = 2'-O-methylcytidine-3'-phosphate
  modified_base 12: mod_base = OTHER; note = 2'-O-methyluridine-3'-phosphate
  modified_base 13: mod_base = OTHER; note = 2'-O-methylguanosine-3'-phosphate
  modified_base 14: mod_base = OTHER; note = 2'-deoxy-2'-fluoroadenosine-3'-phosphate
  modified_base 15: mod_base = OTHER; note = 2'-O-methyladenosine-3'-phosphate
  modified_base 16: mod_base = OTHER; note = 2'-deoxy-2'-fluoroguanosine-3'-phosphate
  modified_base 17: mod_base = OTHER; note = 2'-O-methylguanosine-3'-phosphate
  modified_base 18: mod_base = OTHER; note = 2'-O-methyladenosine-3'-phosphate
  modified_base 19: mod_base = OTHER; note = 2'-O-methyladenosine-3'-phosphate
  modified_base 20: mod_base = OTHER; note = 2'-O-methylguanosine-3'-phosphate
  modified_base 21: mod_base = OTHER; note = 2'-O-methylguanosine-3'-phosphorothioate
  modified_base 22: mod_base = OTHER; note = 2'-O-methyladenosine-3'-phosphorothioate
  modified_base 23: mod_base = OTHER; note = 2'-O-methylguanosine
acgcacgcctctgaaggaaggag

SEQ ID NO: 912 - RNA, 23 nt, synthetic construct
  source 1..23: mol_type = other RNA
  modified_base 1: mod_base = OTHER; note = 2'-O-methyladenosine-3'-phosphorothioate
  modified_base 2: mod_base = OTHER; note = 2'-deoxy-2'-fluorouridine-3'-phosphorothioate
  modified_base 3: mod_base = OTHER; note = 2'-O-methyladenosine-3'-phosphate
  modified_base 4: mod_base = OTHER; note = 2'-O-methyluridine-3'-phosphate
  modified_base 5: mod_base = OTHER; note = 2'-O-methylcytidine-3'-phosphate
  modified_base 6: mod_base = OTHER; note = 2'-deoxy-2'-fluoroguanosine-3'-phosphate
  modified_base 7: mod_base = OTHER; note = 2'-O-methylcytidine-3'-phosphate
  modified_base 8: mod_base = OTHER; note = 2'-O-methyladenosine-3'-phosphate
  modified_base 9: mod_base = OTHER; note = 2'-O-methylcytidine-3'-phosphate
  modified_base 10: mod_base = OTHER; note = 2'-O-methylguanosine-3'-phosphate
  modified_base 11: mod_base = OTHER; note = 2'-O-methylcytidine-3'-phosphate
  modified_base 12: mod_base = OTHER; note = 2'-O-methylcytidine-3'-phosphate
  modified_base 13: mod_base = OTHER; note = 2'-O-methyluridine-3'-phosphate
  modified_base 14: mod_base = OTHER; note = 2'-deoxy-2'-fluorocytidine-3'-phosphate
  modified_base 15: mod_base = OTHER; note = 2'-O-methyluridine-3'-phosphate
  modified_base 16: mod_base = OTHER; note = 2'-deoxy-2'-fluoroguanosine-3'-phosphate
  modified_base 17: mod_base = OTHER; note = 2'-O-methyladenosine-3'-phosphate
  modified_base 18: mod_base = OTHER; note = 2'-O-methyladenosine-3'-phosphate
  modified_base 19: mod_base = OTHER; note = 2'-O-methylguanosine-3'-phosphate
  modified_base 20: mod_base = OTHER; note = 2'-O-methylguanosine-3'-phosphate
  modified_base 21: mod_base = OTHER; note = 2'-O-methyladenosine-3'-phosphorothioate
  modified_base 22: mod_base = OTHER; note = 2'-O-methyladenosine-3'-phosphorothioate
  modified_base 23: mod_base = OTHER; note = 2'-O-methylguanosine
atatcgcacgcctctgaaggaag

SEQ ID NO: 913 - RNA, 23 nt, synthetic construct
  source 1..23: mol_type = other RNA
  modified_base 1: mod_base = OTHER; note = 2'-O-methyladenosine-3'-phosphorothioate
  modified_base 2: mod_base = OTHER; note = 2'-deoxy-2'-fluorocytidine-3'-phosphorothioate
  modified_base 3: mod_base = OTHER; note = 2'-O-methyladenosine-3'-phosphate
  modified_base 4: mod_base = OTHER; note = 2'-O-methyluridine-3'-phosphate
  modified_base 5: mod_base = OTHER; note = 2'-O-methyladenosine-3'-phosphate
  modified_base 6: mod_base = OTHER; note = 2'-deoxy-2'-fluorouridine-3'-phosphate
  modified_base 7: mod_base = OTHER; note = 2'-O-methylcytidine-3'-phosphate
  modified_base 8: mod_base = OTHER; note = 2'-O-methylguanosine-3'-phosphate
  modified_base 9: mod_base = OTHER; note = 2'-O-methylcytidine-3'-phosphate
  modified_base 10: mod_base = OTHER; note = 2'-O-methyladenosine-3'-phosphate
  modified_base 11: mod_base = OTHER; note = 2'-O-methylcytidine-3'-phosphate
  modified_base 12: mod_base = OTHER; note = 2'-O-methylguanosine-3'-phosphate
  modified_base 13: mod_base = OTHER; note = 2'-O-methylcytidine-3'-phosphate
  modified_base 14: mod_base = OTHER; note = 2'-deoxy-2'-fluorocytidine-3'-phosphate
  modified_base 15: mod_base = OTHER; note = 2'-O-methyluridine-3'-phosphate
  modified_base 16: mod_base = OTHER; note = 2'-deoxy-2'-fluorocytidine-3'-phosphate
  modified_base 17: mod_base = OTHER; note = 2'-O-methyluridine-3'-phosphate
  modified_base 18: mod_base = OTHER; note = 2'-O-methylguanosine-3'-phosphate
  modified_base 19: mod_base = OTHER; note = 2'-O-methyladenosine-3'-phosphate
  modified_base 20: mod_base = OTHER; note = 2'-O-methyladenosine-3'-phosphate
  modified_base 21: mod_base = OTHER; note = 2'-O-methylguanosine-3'-phosphorothioate
  modified_base 22: mod_base = OTHER; note = 2'-O-methylguanosine-3'-phosphorothioate
  modified_base 23: mod_base = OTHER; note = 2'-O-methyladenosine
acatatcgcacgcctctgaagga

SEQ ID NO: 914 - RNA, 23 nt, synthetic construct
  source 1..23: mol_type = other RNA
  modified_base 1: mod_base = OTHER; note = 2'-O-methyladenosine-3'-phosphorothioate
  modified_base 2: mod_base = OTHER; note = 2'-deoxy-2'-fluoroadenosine-3'-phosphorothioate
  modified_base 3: mod_base = OTHER; note = 2'-O-methylcytidine-3'-phosphate
  modified_base 4: mod_base = OTHER; note = 2'-O-methyladenosine-3'-phosphate
  modified_base 5: mod_base = OTHER; note = 2'-O-methyluridine-3'-phosphate
  modified_base 6: mod_base = OTHER; note = 2'-deoxy-2'-fluoroadenosine-3'-phosphate
  modified_base 7: mod_base = OTHER; note = 2'-O-methyluridine-3'-phosphate
  modified_base 8: mod_base = OTHER; note = 2'-O-methylcytidine-3'-phosphate
  modified_base 9: mod_base = OTHER; note = 2'-O-methylguanosine-3'-phosphate
  modified_base 10: mod_base = OTHER; note = 2'-O-methylcytidine-3'-phosphate
  modified_base 11: mod_base = OTHER; note = 2'-O-methyladenosine-3'-phosphate
  modified_base 12: mod_base = OTHER; note = 2'-O-methylcytidine-3'-phosphate
  modified_base 13: mod_base = OTHER; note = 2'-O-methylguanosine-3'-phosphate
  modified_base 14: mod_base = OTHER; note = 2'-deoxy-2'-fluorocytidine-3'-phosphate
  modified_base 15: mod_base = OTHER; note = 2'-O-methylcytidine-3'-phosphate
  modified_base 16: mod_base = OTHER; note = 2'-deoxy-2'-fluorouridine-3'-phosphate
  modified_base 17: mod_base = OTHER; note = 2'-O-methylcytidine-3'-phosphate
  modified_base 18: mod_base = OTHER; note = 2'-O-methyluridine-3'-phosphate
  modified_base 19: mod_base = OTHER; note = 2'-O-methylguanosine-3'-phosphate
  modified_base 20: mod_base = OTHER; note = 2'-O-methyladenosine-3'-phosphate
  modified_base 21: mod_base = OTHER; note = 2'-O-methyladenosine-3'-phosphorothioate
  modified_base 22: mod_base = OTHER; note = 2'-O-methylguanosine-3'-phosphorothioate
  modified_base 23: mod_base = OTHER; note = 2'-O-methylguanosine
aacatatcgcacgcctctgaagg

SEQ ID NO: 915 - RNA, 23 nt, synthetic construct
  source 1..23: mol_type = other RNA
  modified_base 1: mod_base = OTHER; note = 2'-O-methyladenosine-3'-phosphorothioate
  modified_base 2: mod_base = OTHER; note = 2'-deoxy-2'-fluorocytidine-3'-phosphorothioate
  modified_base 3: mod_base = OTHER; note = 2'-O-methyladenosine-3'-phosphate
  modified_base 4: mod_base = OTHER; note = 2'-O-methylcytidine-3'-phosphate
  modified_base 5: mod_base = OTHER; note = 2'-O-methyladenosine-3'-phosphate
  modified_base 6: mod_base = OTHER; note = 2'-deoxy-2'-fluorouridine-3'-phosphate
  modified_base 7: mod_base = OTHER; note = 2'-O-methyladenosine-3'-phosphate
  modified_base 8: mod_base = OTHER; note = 2'-O-methyluridine-3'-phosphate
  modified_base 9: mod_base = OTHER; note = 2'-O-methylcytidine-3'-phosphate
  modified_base 10: mod_base = OTHER; note = 2'-O-methylguanosine-3'-phosphate
  modified_base 11: mod_base = OTHER; note = 2'-O-methylcytidine-3'-phosphate
  modified_base 12: mod_base = OTHER; note = 2'-O-methyladenosine-3'-phosphate
  modified_base 13: mod_base = OTHER; note = 2'-O-methylcytidine-3'-phosphate
  modified_base 14: mod_base = OTHER; note = 2'-deoxy-2'-fluoroguanosine-3'-phosphate
  modified_base 15: mod_base = OTHER; note = 2'-O-methylcytidine-3'-phosphate
  modified_base 16: mod_base = OTHER; note = 2'-deoxy-2'-fluorocytidine-3'-phosphate
  modified_base 17: mod_base = OTHER; note = 2'-O-methyluridine-3'-phosphate
  modified_base 18: mod_base = OTHER; note = 2'-O-methylcytidine-3'-phosphate
  modified_base 19: mod_base = OTHER; note = 2'-O-methyluridine-3'-phosphate
  modified_base 20: mod_base = OTHER; note = 2'-O-methylguanosine-3'-phosphate
  modified_base 21: mod_base = OTHER; note = 2'-O-methyladenosine-3'-phosphorothioate
  modified_base 22: mod_base = OTHER; note = 2'-O-methyladenosine-3'-phosphorothioate
  modified_base 23: mod_base = OTHER; note = 2'-O-methylguanosine
acacatatcgcacgcctctgaag

SEQ ID NO: 916 - RNA, 23 nt, synthetic construct
  source 1..23: mol_type = other RNA
  modified_base 1: mod_base = OTHER; note = 2'-O-methyladenosine-3'-phosphorothioate
  modified_base 2: mod_base = OTHER; note = 2'-deoxy-2'-fluorocytidine-3'-phosphorothioate
  modified_base 3: mod_base = OTHER; note = 2'-O-methylcytidine-3'-phosphate
  modified_base 4: mod_base = OTHER; note = 2'-O-methyladenosine-3'-phosphate
  modified_base 5: mod_base = OTHER; note = 2'-O-methylcytidine-3'-phosphate
  modified_base 6: mod_base = OTHER; note = 2'-deoxy-2'-fluoroadenosine-3'-phosphate
  modified_base 7: mod_base = OTHER; note = 2'-O-methyluridine-3'-phosphate
  modified_base 8: mod_base = OTHER; note = 2'-O-methyladenosine-3'-phosphate
  modified_base 9: mod_base = OTHER; note = 2'-O-methyluridine-3'-phosphate
  modified_base 10: mod_base = OTHER; note = 2'-O-methylcytidine-3'-phosphate
  modified_base 11: mod_base = OTHER; note = 2'-O-methylguanosine-3'-phosphate
  modified_base 12: mod_base = OTHER; note = 2'-O-methylcytidine-3'-phosphate
  modified_base 13: mod_base = OTHER; note = 2'-O-methyladenosine-3'-phosphate
  modified_base 14: mod_base = OTHER; note = 2'-deoxy-2'-fluorocytidine-3'-phosphate
  modified_base 15: mod_base = OTHER; note = 2'-O-methylguanosine-3'-phosphate
  modified_base 16: mod_base = OTHER; note = 2'-deoxy-2'-fluorocytidine-3'-phosphate
  modified_base 17: mod_base = OTHER; note = 2'-O-methylcytidine-3'-phosphate
  modified_base 18: mod_base = OTHER; note = 2'-O-methyluridine-3'-phosphate
  modified_base 19: mod_base = OTHER; note = 2'-O-methylcytidine-3'-phosphate
  modified_base 20: mod_base = OTHER; note = 2'-O-methyluridine-3'-phosphate
  modified_base 21: mod_base = OTHER; note = 2'-O-methylguanosine-3'-phosphorothioate
  modified_base 22: mod_base = OTHER; note = 2'-O-methyladenosine-3'-phosphorothioate
  modified_base 23: mod_base = OTHER; note = 2'-O-methyladenosine
accacatatcgcacgcctctgaa

SEQ ID NO: 917 - RNA, 23 nt, synthetic construct
  source 1..23: mol_type = other RNA
  modified_base 1: mod_base = OTHER; note = 2'-O-methyladenosine-3'-phosphorothioate
  modified_base 2: mod_base = OTHER; note = 2'-deoxy-2'-fluorouridine-3'-phosphorothioate
  modified_base 3: mod_base = OTHER; note = 2'-O-methylcytidine-3'-phosphate
  modified_base 4: mod_base = OTHER; note = 2'-O-methylcytidine-3'-phosphate
  modified_base 5: mod_base = OTHER; note = 2'-O-methyladenosine-3'-phosphate
  modified_base 6: mod_base = OTHER; note = 2'-deoxy-2'-fluorocytidine-3'-phosphate
  modified_base 7: mod_base = OTHER; note = 2'-O-methyladenosine-3'-phosphate
  modified_base 8: mod_base = OTHER; note = 2'-O-methyluridine-3'-phosphate
  modified_base 9: mod_base = OTHER; note = 2'-O-methyladenosine-3'-phosphate
  modified_base 10: mod_base = OTHER; note = 2'-O-methyluridine-3'-phosphate
  modified_base 11: mod_base = OTHER; note = 2'-O-methylcytidine-3'-phosphate
  modified_base 12: mod_base = OTHER; note = 2'-O-methylguanosine-3'-phosphate
  modified_base 13: mod_base = OTHER; note = 2'-O-methylcytidine-3'-phosphate
  modified_base 14: mod_base = OTHER; note = 2'-deoxy-2'-fluoroadenosine-3'-phosphate
  modified_base 15: mod_base = OTHER; note = 2'-O-methylcytidine-3'-phosphate
  modified_base 16: mod_base = OTHER; note = 2'-deoxy-2'-fluoroguanosine-3'-phosphate
  modified_base 17: mod_base = OTHER; note = 2'-O-methylcytidine-3'-phosphate
  modified_base 18: mod_base = OTHER; note = 2'-O-methylcytidine-3'-phosphate
  modified_base 19: mod_base = OTHER; note = 2'-O-methyluridine-3'-phosphate
  modified_base 20: mod_base = OTHER; note = 2'-O-methylcytidine-3'-phosphate
  modified_base 21: mod_base = OTHER; note = 2'-O-methyluridine-3'-phosphorothioate
  modified_base 22: mod_base = OTHER; note = 2'-O-methylguanosine-3'-phosphorothioate
  modified_base 23: mod_base = OTHER; note = 2'-O-methyladenosine
atccacatatcgcacgcctctga

SEQ ID NO: 918 - RNA, 23 nt, synthetic construct
  source 1..23: mol_type = other RNA
  modified_base 1: mod_base = OTHER; note = 2'-O-methyladenosine-3'-phosphorothioate
  modified_base 2: mod_base = OTHER; note = 2'-deoxy-2'-fluorocytidine-3'-phosphorothioate
  modified_base 3: mod_base = OTHER; note = 2'-O-methyladenosine-3'-phosphate
  modified_base 4: mod_base = OTHER; note = 2'-O-methyluridine-3'-phosphate
  modified_base 5: mod_base = OTHER; note = 2'-O-methylcytidine-3'-phosphate
  modified_base 6: mod_base = OTHER; note = 2'-deoxy-2'-fluorocytidine-3'-phosphate
  modified_base 7: mod_base = OTHER; note = 2'-O-methyladenosine-3'-phosphate
  modified_base 8: mod_base = OTHER; note = 2'-O-methylcytidine-3'-phosphate
  modified_base 9: mod_base = OTHER; note = 2'-O-methyladenosine-3'-phosphate
  modified_base 10: mod_base = OTHER; note = 2'-O-methyluridine-3'-phosphate
  modified_base 11: mod_base = OTHER; note = 2'-O-methyladenosine-3'-phosphate
  modified_base 12: mod_base = OTHER; note = 2'-O-methyluridine-3'-phosphate
  modified_base 13: mod_base = OTHER; note = 2'-O-methylcytidine-3'-phosphate
  modified_base 14: mod_base = OTHER; note = 2'-deoxy-2'-fluoroguanosine-3'-phosphate
  modified_base 15: mod_base = OTHER; note = 2'-O-methylcytidine-3'-phosphate
  modified_base 16: mod_base = OTHER; note = 2'-deoxy-2'-fluoroadenosine-3'-phosphate
  modified_base 17: mod_base = OTHER; note = 2'-O-methylcytidine-3'-phosphate
  modified_base 18: mod_base = OTHER; note = 2'-O-methylguanosine-3'-phosphate
  modified_base 19: mod_base = OTHER; note = 2'-O-methylcytidine-3'-phosphate
  modified_base 20: mod_base = OTHER; note = 2'-O-methylcytidine-3'-phosphate
  modified_base 21: mod_base = OTHER; note = 2'-O-methyluridine-3'-phosphorothioate
  modified_base 22: mod_base = OTHER; note = 2'-O-methylcytidine-3'-phosphorothioate
  modified_base 23: mod_base = OTHER; note = 2'-O-methyluridine
acatccacatatcgcacgcctct

SEQ ID NO: 919 - RNA, 23 nt, synthetic construct
  source 1..23: mol_type = other RNA
  modified_base 1: mod_base = OTHER; note = 2'-O-methyladenosine-3'-phosphorothioate
  modified_base 2: mod_base = OTHER; note = 2'-deoxy-2'-fluorocytidine-3'-phosphorothioate
  modified_base 3: mod_base = OTHER; note = 2'-O-methylcytidine-3'-phosphate
  modified_base 4: mod_base = OTHER; note = 2'-O-methyladenosine-3'-phosphate
  modified_base 5: mod_base = OTHER; note = 2'-O-methyluridine-3'-phosphate
  modified_base 6: mod_base = OTHER; note = 2'-deoxy-2'-fluorocytidine-3'-phosphate
  modified_base 7: mod_base = OTHER; note = 2'-O-methylcytidine-3'-phosphate
  modified_base 8: mod_base = OTHER; note = 2'-O-methyladenosine-3'-phosphate
  modified_base 9: mod_base = OTHER; note = 2'-O-methylcytidine-3'-phosphate
  modified_base 10: mod_base = OTHER; note = 2'-O-methyladenosine-3'-phosphate
  modified_base 11: mod_base = OTHER; note = 2'-O-methyluridine-3'-phosphate
  modified_base 12: mod_base = OTHER; note = 2'-O-methyladenosine-3'-phosphate
  modified_base 13: mod_base = OTHER; note = 2'-O-methyluridine-3'-phosphate
  modified_base 14: mod_base = OTHER; note = 2'-deoxy-2'-fluorocytidine-3'-phosphate
  modified_base 15: mod_base = OTHER; note = 2'-O-methylguanosine-3'-phosphate
  modified_base 16: mod_base = OTHER; note = 2'-deoxy-2'-fluorocytidine-3'-phosphate
  modified_base 17: mod_base = OTHER; note = 2'-O-methyladenosine-3'-phosphate
  modified_base 18: mod_base = OTHER; note = 2'-O-methylcytidine-3'-phosphate
  modified_base 19: mod_base = OTHER; note = 2'-O-methylguanosine-3'-phosphate
  modified_base 20: mod_base = OTHER; note = 2'-O-methylcytidine-3'-phosphate
  modified_base 21: mod_base = OTHER; note = 2'-O-methylcytidine-3'-phosphorothioate
  modified_base 22: mod_base = OTHER; note = 2'-O-methyluridine-3'-phosphorothioate
  modified_base 23: mod_base = OTHER; note = 2'-O-methylcytidine
accatccacatatcgcacgcctc

SEQ ID NO: 920 - RNA, 23 nt, synthetic construct
  source 1..23: mol_type = other RNA
  modified_base 1: mod_base = OTHER; note = 2'-O-methyladenosine-3'-phosphorothioate
  modified_base 2: mod_base = OTHER; note = 2'-deoxy-2'-fluorocytidine-3'-phosphorothioate
  modified_base 3: mod_base = OTHER; note = 2'-O-methyluridine-3'-phosphate
  modified_base 4: mod_base = OTHER; note = 2'-O-methylcytidine-3'-phosphate
  modified_base 5: mod_base = OTHER; note = 2'-O-methylcytidine-3'-phosphate
  modified_base 6: mod_base = OTHER; note = 2'-deoxy-2'-fluoroadenosine-3'-phosphate
  modified_base 7: mod_base = OTHER; note = 2'-O-methyluridine-3'-phosphate
  modified_base 8: mod_base = OTHER; note = 2'-O-methylcytidine-3'-phosphate
  modified_base 9: mod_base = OTHER; note = 2'-O-methylcytidine-3'-phosphate
  modified_base 10: mod_base = OTHER; note = 2'-O-methyladenosine-3'-phosphate
  modified_base 11: mod_base = OTHER; note = 2'-O-methylcytidine-3'-phosphate
  modified_base 12: mod_base = OTHER; note = 2'-O-methyladenosine-3'-phosphate
  modified_base 13: mod_base = OTHER; note = 2'-O-methyluridine-3'-phosphate
  modified_base 14: mod_base = OTHER; note = 2'-deoxy-2'-fluoroadenosine-3'-phosphate
  modified_base 15: mod_base = OTHER; note = 2'-O-methyluridine-3'-phosphate
  modified_base 16: mod_base = OTHER; note = 2'-deoxy-2'-fluorocytidine-3'-phosphate
  modified_base 17: mod_base = OTHER; note = 2'-O-methylguanosine-3'-phosphate
  modified_base 18: mod_base = OTHER; note = 2'-O-methylcytidine-3'-phosphate
  modified_base 19: mod_base = OTHER; note = 2'-O-methyladenosine-3'-phosphate
  modified_base 20: mod_base = OTHER; note = 2'-O-methylcytidine-3'-phosphate
  modified_base 21: mod_base = OTHER; note = 2'-O-methylguanosine-3'-phosphorothioate
  modified_base 22: mod_base = OTHER; note = 2'-O-methylcytidine-3'-phosphorothioate
  modified_base 23: mod_base = OTHER; note = 2'-O-methylcytidine
actccatccacatatcgcacgcc

SEQ ID NO: 921 - RNA, 23 nt, synthetic construct
  source 1..23: mol_type = other RNA
  modified_base 1: mod_base = OTHER; note = 2'-O-methyladenosine-3'-phosphorothioate
  modified_base 2: mod_base = OTHER; note = 2'-deoxy-2'-fluorocytidine-3'-phosphorothioate
  modified_base 3: mod_base = OTHER; note = 2'-O-methylcytidine-3'-phosphate
  modified_base 4: mod_base = OTHER; note = 2'-O-methyluridine-3'-phosphate
  modified_base 5: mod_base = OTHER; note = 2'-O-methylcytidine-3'-phosphate
  modified_base 6: mod_base = OTHER; note = 2'-deoxy-2'-fluorocytidine-3'-phosphate
  modified_base 7: mod_base = OTHER; note = 2'-O-methyladenosine-3'-phosphate
  modified_base 8: mod_base = OTHER; note = 2'-O-methyluridine-3'-phosphate
  modified_base 9: mod_base = OTHER; note = 2'-O-methylcytidine-3'-phosphate
  modified_base 10: mod_base = OTHER; note = 2'-O-methylcytidine-3'-phosphate
  modified_base 11: mod_base = OTHER; note = 2'-O-methyladenosine-3'-phosphate
  modified_base 12: mod_base = OTHER; note = 2'-O-methylcytidine-3'-phosphate
  modified_base 13: mod_base = OTHER; note = 2'-O-methyladenosine-3'-phosphate
  modified_base 14: mod_base = OTHER; note = 2'-deoxy-2'-fluorouridine-3'-phosphate
  modified_base 15: mod_base = OTHER; note = 2'-O-methyladenosine-3'-phosphate
  modified_base 16: mod_base = OTHER; note = 2'-deoxy-2'-fluorouridine-3'-phosphate
  modified_base 17: mod_base = OTHER; note = 2'-O-methylcytidine-3'-phosphate
  modified_base 18: mod_base = OTHER; note = 2'-O-methylguanosine-3'-phosphate
  modified_base 19: mod_base = OTHER; note = 2'-O-methylcytidine-3'-phosphate
  modified_base 20: mod_base = OTHER; note = 2'-O-methyladenosine-3'-phosphate
  modified_base 21: mod_base = OTHER; note = 2'-O-methylcytidine-3'-phosphorothioate
  modified_base 22: mod_base = OTHER; note = 2'-O-methylguanosine-3'-phosphorothioate
  modified_base 23: mod_base = OTHER; note = 2'-O-methylcytidine
acctccatccacatatcgcacgc

SEQ ID NO: 922 - DNA, 23 bp, synthetic construct
  source 1..23: mol_type = other DNA
  modified_base 1: mod_base = OTHER; note = 2'-O-methyladenosine-3'-phosphorothioate
  modified_base 2: mod_base = OTHER; note = 2'-deoxy-2'-fluoroadenosine-3'-phosphorothioate
  modified_base 3: mod_base = OTHER; note = 2'-O-methyladenosine-3'-phosphate
  modified_base 4: mod_base = OTHER; note = 2'-O-methylguanosine-3'-phosphate
  modified_base 6: mod_base = OTHER; note = 2'-O-methylguanosine-3'-phosphate
  modified_base 7: mod_base = OTHER; note = Thymidine-glycol nucleic acid (GNA), S-Isomer
  modified_base 8: mod_base = OTHER; note = 2'-O-methyladenosine-3'-phosphate
  modified_base 9: mod_base = OTHER; note = 2'-O-methylcytidine-3'-phosphate
  modified_base 10: mod_base = OTHER; note = 2'-O-methylguanosine-3'-phosphate
  modified_base 11: mod_base = OTHER; note = 2'-O-methyluridine-3'-phosphate
  modified_base 12: mod_base = OTHER; note = 2'-O-methyluridine-3'-phosphate
  modified_base 13: mod_base = OTHER; note = 2'-O-methylguanosine-3'-phosphate
  modified_base 14: mod_base = OTHER; note = 2'-deoxy-2'-fluorouridine-3'-phosphate
  modified_base 15: mod_base = OTHER; note = 2'-O-methylcytidine-3'-phosphate
  modified_base 16: mod_base = OTHER; note = 2'-deoxy-2'-fluoroadenosine-3'-phosphate
  modified_base 17: mod_base = OTHER; note = 2'-O-methylcytidine-3'-phosphate
  modified_base 18: mod_base = OTHER; note = 2'-O-methyluridine-3'-phosphate
  modified_base 19: mod_base = OTHER; note = 2'-O-methylcytidine-3'-phosphate
  modified_base 20: mod_base = OTHER; note = 2'-O-methyladenosine-3'-phosphate
  modified_base 21: mod_base = OTHER; note = 2'-O-methylcytidine-3'-phosphorothioate
  modified_base 22: mod_base = OTHER; note = 2'-O-methyluridine-3'-phosphorothioate
  modified_base 23: mod_base = OTHER; note = 2'-O-methylcytidine
  misc_feature 1..4: note = RNA
  misc_feature 6..23: note = RNA
  misc_feature 5: note = DNA
aaagggtacgttgtcactcactc

SEQ ID NO: 923 - RNA, 23 nt, synthetic construct
  source 1..23: mol_type = other RNA
  modified_base 1: mod_base = OTHER; note = 2'-O-methyladenosine-3'-phosphorothioate
  modified_base 2: mod_base = OTHER; note = 2'-deoxy-2'-fluoroadenosine-3'-phosphorothioate
  modified_base 3: mod_base = OTHER; note = 2'-O-methyluridine-3'-phosphate
  modified_base 4: mod_base = OTHER; note = 2'-O-methylguanosine-3'-phosphate
  modified_base 5: mod_base = OTHER; note = 2'-O-methyladenosine-3'-phosphate
  modified_base 6: mod_base = OTHER; note = 2'-deoxy-2'-fluoroadenosine-3'-phosphate
  modified_base 7: mod_base = OTHER; note = 2'-O-methylguanosine-3'-phosphate
  modified_base 8: mod_base = OTHER; note = 2'-O-methylguanosine-3'-phosphate
  modified_base 9: mod_base = OTHER; note = 2'-O-methylguanosine-3'-phosphate
  modified_base 10: mod_base = OTHER; note = 2'-O-methyluridine-3'-phosphate
  modified_base 11: mod_base = OTHER; note = 2'-O-methyladenosine-3'-phosphate
  modified_base 12: mod_base = OTHER; note = 2'-O-methylcytidine-3'-phosphate
  modified_base 13: mod_base = OTHER; note = 2'-O-methylguanosine-3'-phosphate
  modified_base 14: mod_base = OTHER; note = 2'-deoxy-2'-fluorouridine-3'-phosphate
  modified_base 15: mod_base = OTHER; note = 2'-O-methyluridine-3'-phosphate
  modified_base 16: mod_base = OTHER; note = 2'-deoxy-2'-fluoroguanosine-3'-phosphate
  modified_base 17: mod_base = OTHER; note = 2'-O-methyluridine-3'-phosphate
  modified_base 18: mod_base = OTHER; note = 2'-O-methylcytidine-3'-phosphate
  modified_base 19: mod_base = OTHER; note = 2'-O-methyladenosine-3'-phosphate
  modified_base 20: mod_base = OTHER; note = 2'-O-methylcytidine-3'-phosphate
  modified_base 21: mod_base = OTHER; note = 2'-O-methyluridine-3'-phosphorothioate
  modified_base 22: mod_base = OTHER; note = 2'-O-methylcytidine-3'-phosphorothioate
  modified_base 23: mod_base = OTHER; note = 2'-O-methyladenosine
aatgaagggtacgttgtcactca

SEQ ID NO: 924 - RNA, 23 nt, synthetic construct
  source 1..23: mol_type = other RNA
  modified_base 1: mod_base = OTHER; note = 2'-O-methyladenosine-3'-phosphorothioate
  modified_base 2: mod_base = OTHER; note = 2'-deoxy-2'-fluoroadenosine-3'-phosphorothioate
  modified_base 3: mod_base = OTHER; note = 2'-O-methyladenosine-3'-phosphate
  modified_base 4: mod_base = OTHER; note = 2'-O-methyluridine-3'-phosphate
  modified_base 5: mod_base = OTHER; note = 2'-O-methylguanosine-3'-phosphate
  modified_base 6: mod_base = OTHER; note = 2'-deoxy-2'-fluoroadenosine-3'-phosphate
  modified_base 7: mod_base = OTHER; note = 2'-O-methyladenosine-3'-phosphate
  modified_base 8: mod_base = OTHER; note = 2'-O-methylguanosine-3'-phosphate
  modified_base 9: mod_base = OTHER; note = 2'-O-methylguanosine-3'-phosphate
  modified_base 10: mod_base = OTHER; note = 2'-O-methylguanosine-3'-phosphate
  modified_base 11: mod_base = OTHER; note = 2'-O-methyluridine-3'-phosphate
  modified_base 12: mod_base = OTHER; note = 2'-O-methyladenosine-3'-phosphate
  modified_base 13: mod_base = OTHER; note = 2'-O-methylcytidine-3'-phosphate
  modified_base 14: mod_base = OTHER; note = 2'-deoxy-2'-fluoroguanosine-3'-phosphate
  modified_base 15: mod_base = OTHER; note = 2'-O-methyluridine-3'-phosphate
  modified_base 16: mod_base = OTHER; note = 2'-deoxy-2'-fluorouridine-3'-phosphate
  modified_base 17: mod_base = OTHER; note = 2'-O-methylguanosine-3'-phosphate
  modified_base 18: mod_base = OTHER; note = 2'-O-methyluridine-3'-phosphate
  modified_base 19: mod_base = OTHER; note = 2'-O-methylcytidine-3'-phosphate
  modified_base 20: mod_base = OTHER; note = 2'-O-methyladenosine-3'-phosphate
  modified_base 21: mod_base = OTHER; note = 2'-O-methylcytidine-3'-phosphorothioate
  modified_base 22: mod_base = OTHER; note = 2'-O-methyluridine-3'-phosphorothioate
  modified_base 23: mod_base = OTHER; note = 2'-O-methylcytidine
aaatgaagggtacgttgtcactc

SEQ ID NO: 925 - RNA, 23 nt, synthetic construct
  source 1..23: mol_type = other RNA
  modified_base 1: mod_base = OTHER; note = 2'-O-methyladenosine-3'-phosphorothioate
  modified_base 2: mod_base = OTHER; note = 2'-deoxy-2'-fluorocytidine-3'-phosphorothioate
  modified_base 3: mod_base = OTHER; note = 2'-O-methyladenosine-3'-phosphate
  modified_base 4: mod_base = OTHER; note = 2'-O-methyladenosine-3'-phosphate
  modified_base 5: mod_base = OTHER; note = 2'-O-methyluridine-3'-phosphate
  modified_base 6: mod_base = OTHER; note = 2'-deoxy-2'-fluoroguanosine-3'-phosphate
  modified_base 7: mod_base = OTHER; note = 2'-O-methyladenosine-3'-phosphate
  modified_base 8: mod_base = OTHER; note = 2'-O-methyladenosine-3'-phosphate
  modified_base 9: mod_base = OTHER; note = 2'-O-methylguanosine-3'-phosphate
  modified_base 10: mod_base = OTHER; note = 2'-O-methylguanosine-3'-phosphate
  modified_base 11: mod_base = OTHER; note = 2'-O-methylguanosine-3'-phosphate
  modified_base 12: mod_base = OTHER; note = 2'-O-methyluridine-3'-phosphate
  modified_base 13: mod_base = OTHER; note = 2'-O-methyladenosine-3'-phosphate
  modified_base 14: mod_base = OTHER; note = 2'-deoxy-2'-fluorocytidine-3'-phosphate
  modified_base 15: mod_base = OTHER; note = 2'-O-methylguanosine-3'-phosphate
  modified_base 16: mod_base = OTHER; note = 2'-deoxy-2'-fluorouridine-3'-phosphate
  modified_base 17: mod_base = OTHER; note = 2'-O-methyluridine-3'-phosphate
  modified_base 18: mod_base = OTHER; note = 2'-O-methylguanosine-3'-phosphate
  modified_base 19: mod_base = OTHER; note = 2'-O-methyluridine-3'-phosphate
  modified_base 20: mod_base = OTHER; note = 2'-O-methylcytidine-3'-phosphate
  modified_base 21: mod_base = OTHER; note = 2'-O-methyladenosine-3'-phosphorothioate
  modified_base 22: mod_base = OTHER; note = 2'-O-methylcytidine-3'-phosphorothioate
  modified_base 23: mod_base = OTHER; note = 2'-O-methyluridine
acaatgaagggtacgttgtcact

SEQ ID NO: 926 - RNA, 23 nt, synthetic construct
  source 1..23: mol_type = other RNA
  modified_base 1: mod_base = OTHER; note = 2'-O-methyladenosine-3'-phosphorothioate
  modified_base 2: mod_base = OTHER; note = 2'-deoxy-2'-fluorouridine-3'-phosphorothioate
  modified_base 3: mod_base = OTHER; note = 2'-O-methylcytidine-3'-phosphate
  modified_base 4: mod_base = OTHER; note = 2'-O-methyladenosine-3'-phosphate
  modified_base 5: mod_base = OTHER; note = 2'-O-methyladenosine-3'-phosphate
  modified_base 6: mod_base = OTHER; note = 2'-deoxy-2'-fluorouridine-3'-phosphate
  modified_base 7: mod_base = OTHER; note = 2'-O-methylguanosine-3'-phosphate
  modified_base 8: mod_base = OTHER; note = 2'-O-methyladenosine-3'-phosphate
  modified_base 9: mod_base = OTHER; note = 2'-O-methyladenosine-3'-phosphate
  modified_base 10: mod_base = OTHER; note = 2'-O-methylguanosine-3'-phosphate
  modified_base 11: mod_base = OTHER; note = 2'-O-methylguanosine-3'-phosphate
  modified_base 12: mod_base = OTHER; note = 2'-O-methylguanosine-3'-phosphate
  modified_base 13: mod_base = OTHER; note = 2'-O-methyluridine-3'-phosphate
  modified_base 14: mod_base = OTHER; note = 2'-deoxy-2'-fluoroadenosine-3'-phosphate
  modified_base 15: mod_base = OTHER; note = 2'-O-methylcytidine-3'-phosphate
  modified_base 16: mod_base = OTHER; note = 2'-deoxy-2'-fluoroguanosine-3'-phosphate
  modified_base 17: mod_base = OTHER; note = 2'-O-methyluridine-3'-phosphate
  modified_base 18: mod_base = OTHER; note = 2'-O-methyluridine-3'-phosphate
  modified_base 19: mod_base = OTHER; note = 2'-O-methylguanosine-3'-phosphate
  modified_base 20: mod_base = OTHER; note = 2'-O-methyluridine-3'-phosphate
  modified_base 21: mod_base = OTHER; note = 2'-O-methylcytidine-3'-phosphorothioate
  modified_base 22: mod_base = OTHER; note = 2'-O-methyladenosine-3'-phosphorothioate
  modified_base 23: mod_base = OTHER; note = 2'-O-methylcytidine
atcaatgaagggtacgttgtcac

SEQ ID NO: 927 - RNA, 23 nt, synthetic construct
  source 1..23: mol_type = other RNA
  modified_base 1: mod_base = OTHER; note = 2'-O-methyladenosine-3'-phosphorothioate
  modified_base 2: mod_base = OTHER; note = 2'-deoxy-2'-fluoroadenosine-3'-phosphorothioate
  modified_base 3: mod_base = OTHER; note = 2'-O-methyluridine-3'-phosphate
  modified_base 4: mod_base = OTHER; note = 2'-O-methylcytidine-3'-phosphate
  modified_base 5: mod_base = OTHER; note = 2'-O-methyladenosine-3'-phosphate
  modified_base 6: mod_base = OTHER; note = 2'-deoxy-2'-fluoroadenosine-3'-phosphate
  modified_base 7: mod_base = OTHER; note = 2'-O-methyluridine-3'-phosphate
  modified_base 8: mod_base = OTHER; note = 2'-O-methylguanosine-3'-phosphate
  modified_base 9: mod_base = OTHER; note = 2'-O-methyladenosine-3'-phosphate
  modified_base 10: mod_base = OTHER; note = 2'-O-methyladenosine-3'-phosphate
  modified_base 11: mod_base = OTHER; note = 2'-O-methylguanosine-3'-phosphate
  modified_base 12: mod_base = OTHER; note = 2'-O-methylguanosine-3'-phosphate
  modified_base 13: mod_base = OTHER; note = 2'-O-methylguanosine-3'-phosphate
  modified_base 14: mod_base = OTHER; note = 2'-deoxy-2'-fluorouridine-3'-phosphate
  modified_base 15: mod_base = OTHER; note = 2'-O-methyladenosine-3'-phosphate
  modified_base 16: mod_base = OTHER; note = 2'-deoxy-2'-fluorocytidine-3'-phosphate
  modified_base 17: mod_base = OTHER; note = 2'-O-methylguanosine-3'-phosphate
  modified_base 18: mod_base = OTHER; note = 2'-O-methyluridine-3'-phosphate
  modified_base 19: mod_base = OTHER; note = 2'-O-methyluridine-3'-phosphate
  modified_base 20: mod_base = OTHER; note = 2'-O-methylguanosine-3'-phosphate
  modified_base 21: mod_base = OTHER; note = 2'-O-methyluridine-3'-phosphorothioate
  modified_base 22: mod_base = OTHER; note = 2'-O-methylcytidine-3'-phosphorothioate
  modified_base 23: mod_base = OTHER; note = 2'-O-methyladenosine
aatcaatgaagggtacgttgtca

SEQ ID NO: 928 - RNA, 23 nt, synthetic construct
  source 1..23: mol_type = other RNA
  modified_base 1: mod_base = OTHER; note = 2'-O-methyladenosine-3'-phosphorothioate
  modified_base 2: mod_base = OTHER; note = 2'-deoxy-2'-fluorocytidine-3'-phosphorothioate
  modified_base 3: mod_base = OTHER; note = 2'-O-methyladenosine-3'-phosphate
  modified_base 4: mod_base = OTHER; note = 2'-O-methyluridine-3'-phosphate
  modified_base 5: mod_base = OTHER; note = 2'-O-methylcytidine-3'-phosphate
  modified_base 6: mod_base = OTHER; note = 2'-deoxy-2'-fluoroadenosine-3'-phosphate
  modified_base 7: mod_base = OTHER; note = 2'-O-methyladenosine-3'-phosphate
  modified_base 8: mod_base = OTHER; note = 2'-O-methyluridine-3'-phosphate
  modified_base 9: mod_base = OTHER; note = 2'-O-methylguanosine-3'-phosphate
  modified_base 10: mod_base = OTHER; note = 2'-O-methyladenosine-3'-phosphate
  modified_base 11: mod_base = OTHER; note = 2'-O-methyladenosine-3'-phosphate
  modified_base 12: mod_base = OTHER; note = 2'-O-methylguanosine-3'-phosphate
  modified_base 13: mod_base = OTHER; note = 2'-O-methylguanosine-3'-phosphate
  modified_base 14: mod_base = OTHER; note = 2'-deoxy-2'-fluoroguanosine-3'-phosphate
  modified_base 15: mod_base = OTHER; note = 2'-O-methyluridine-3'-phosphate
  modified_base 16: mod_base = OTHER; note = 2'-deoxy-2'-fluoroadenosine-3'-phosphate
  modified_base 17: mod_base = OTHER; note = 2'-O-methylcytidine-3'-phosphate
  modified_base 18: mod_base = OTHER; note = 2'-O-methylguanosine-3'-phosphate
  modified_base 19: mod_base = OTHER; note = 2'-O-methyluridine-3'-phosphate
  modified_base 20: mod_base = OTHER; note = 2'-O-methyluridine-3'-phosphate
  modified_base 21: mod_base = OTHER; note = 2'-O-methylguanosine-3'-phosphorothioate
  modified_base 22: mod_base = OTHER; note = 2'-O-methyluridine-3'-phosphorothioate
  modified_base 23: mod_base = OTHER; note = 2'-O-methylcytidine
acatcaatgaagggtacgttgtc

SEQ ID NO: 929 - RNA, 23 nt, synthetic construct
  source 1..23: mol_type = other RNA
  modified_base 1: mod_base = OTHER; note = 2'-O-methyladenosine-3'-phosphorothioate
  modified_base 2: mod_base = OTHER; note = 2'-deoxy-2'-fluoroguanosine-3'-phosphorothioate
  modified_base 3: mod_base = OTHER; note = 2'-O-methylcytidine-3'-phosphate
  modified_base 4: mod_base = OTHER; note = 2'-O-methyladenosine-3'-phosphate
  modified_base 5: mod_base = OTHER; note = 2'-O-methyluridine-3'-phosphate
  modified_base 6: mod_base = OTHER; note = 2'-deoxy-2'-fluorocytidine-3'-phosphate
  modified_base 7: mod_base = OTHER; note = 2'-O-methyladenosine-3'-phosphate
  modified_base 8: mod_base = OTHER; note = 2'-O-methyladenosine-3'-phosphate
  modified_base 9: mod_base = OTHER; note = 2'-O-methyluridine-3'-phosphate
  modified_base 10: mod_base = OTHER; note = 2'-O-methylguanosine-3'-phosphate
  modified_base 11: mod_base = OTHER; note = 2'-O-methyladenosine-3'-phosphate
  modified_base 12: mod_base = OTHER; note = 2'-O-methyladenosine-3'-phosphate
  modified_base 13: mod_base = OTHER; note = 2'-O-methylguanosine-3'-phosphate
  modified_base 14: mod_base = OTHER; note = 2'-deoxy-2'-fluoroguanosine-3'-phosphate
  modified_base 15: mod_base = OTHER; note = 2'-O-methylguanosine-3'-phosphate
  modified_base 16: mod_base = OTHER; note = 2'-deoxy-2'-fluorouridine-3'-phosphate
  modified_base 17: mod_base = OTHER; note = 2'-O-methyladenosine-3'-phosphate
  modified_base 18: mod_base = OTHER; note = 2'-O-methylcytidine-3'-phosphate
  modified_base 19: mod_base = OTHER; note = 2'-O-methylguanosine-3'-phosphate
  modified_base 20: mod_base = OTHER; note = 2'-O-methyluridine-3'-phosphate
  modified_base 21: mod_base = OTHER; note = 2'-O-methyluridine-3'-phosphorothioate
  modified_base 22: mod_base = OTHER; note = 2'-O-methylguanosine-3'-phosphorothioate
  modified_base 23: mod_base = OTHER; note = 2'-O-methyluridine
agcatcaatgaagggtacgttgt

SEQ ID NO: 930 - DNA, 23 bp, synthetic construct
  source 1..23: mol_type = other DNA
  modified_base 1: mod_base = OTHER; note = 2'-O-methyladenosine-3'-phosphorothioate
  modified_base 2: mod_base = OTHER; note = 2'-deoxy-2'-fluorouridine-3'-phosphorothioate
  modified_base 3: mod_base = OTHER; note = 2'-O-methylguanosine-3'-phosphate
  modified_base 4: mod_base = OTHER; note = 2'-O-methylguanosine-3'-phosphate
  modified_base 6: mod_base = OTHER; note = 2'-O-methyladenosine-3'-phosphate
  modified_base 7: mod_base = OTHER; note = Thymidine-glycol nucleic acid (GNA), S-Isomer
  modified_base 8: mod_base = OTHER; note = 2'-O-methylcytidine-3'-phosphate
  modified_base 9: mod_base = OTHER; note = 2'-O-methyladenosine-3'-phosphate
  modified_base 10: mod_base = OTHER; note = 2'-O-methyladenosine-3'-phosphate
  modified_base 11: mod_base = OTHER; note = 2'-O-methyluridine-3'-phosphate
  modified_base 12: mod_base = OTHER; note = 2'-O-methylguanosine-3'-phosphate
  modified_base 13: mod_base = OTHER; note = 2'-O-methyladenosine-3'-phosphate
  modified_base 14: mod_base = OTHER; note = 2'-deoxy-2'-fluoroadenosine-3'-phosphate
  modified_base 15: mod_base = OTHER; note = 2'-O-methylguanosine-3'-phosphate
  modified_base 16: mod_base = OTHER; note = 2'-deoxy-2'-fluoroguanosine-3'-phosphate
  modified_base 17: mod_base = OTHER; note = 2'-O-methylguanosine-3'-phosphate
  modified_base 18: mod_base = OTHER; note = 2'-O-methyluridine-3'-phosphate
  modified_base 19: mod_base = OTHER; note = 2'-O-methyladenosine-3'-phosphate
  modified_base 20: mod_base = OTHER; note = 2'-O-methylcytidine-3'-phosphate
  modified_base 21: mod_base = OTHER; note = 2'-O-methylguanosine-3'-phosphorothioate
  modified_base 22: mod_base = OTHER; note = 2'-O-methyluridine-3'-phosphorothioate
  modified_base 23: mod_base = OTHER; note = 2'-O-methyluridine
  misc_feature 1..4: note = RNA
  misc_feature 6..23: note = RNA
  misc_feature 5: note = DNA
atggcatcaatgaagggtacgtt

SEQ ID NO: 931 - DNA, 23 bp, synthetic construct
  source 1..23: mol_type = other DNA
  modified_base 1: mod_base = OTHER; note = 2'-O-methyladenosine-3'-phosphorothioate
  modified_base 2: mod_base = OTHER; note = 2'-deoxy-2'-fluorouridine-3'-phosphorothioate
  modified_base 3: mod_base = OTHER; note = 2'-O-methyluridine-3'-phosphate
  modified_base 4: mod_base = OTHER; note = 2'-O-methylguanosine-3'-phosphate
  modified_base 6: mod_base = OTHER; note = 2'-O-methylcytidine-3'-phosphate
  modified_base 7: mod_base = OTHER; note = Adenosine-glycol nucleic acid (GNA), S-isomer
  modified_base 8: mod_base = OTHER; note = 2'-O-methyluridine-3'-phosphate
  modified_base 9: mod_base = OTHER; note = 2'-O-methylcytidine-3'-phosphate
  modified_base 10: mod_base = OTHER; note = 2'-O-methyladenosine-3'-phosphate
  modified_base 11: mod_base = OTHER; note = 2'-O-methyladenosine-3'-phosphate
  modified_base 12: mod_base = OTHER; note = 2'-O-methyluridine-3'-phosphate
  modified_base 13: mod_base = OTHER; note = 2'-O-methylguanosine-3'-phosphate
  modified_base 14: mod_base = OTHER; note = 2'-deoxy-2'-fluoroadenosine-3'-phosphate
  modified_base 15: mod_base = OTHER; note = 2'-O-methyladenosine-3'-phosphate
  modified_base 16: mod_base = OTHER; note = 2'-deoxy-2'-fluoroguanosine-3'-phosphate
  modified_base 17: mod_base = OTHER; note = 2'-O-methylguanosine-3'-phosphate
  modified_base 18: mod_base = OTHER; note = 2'-O-methylguanosine-3'-phosphate
  modified_base 19: mod_base = OTHER; note = 2'-O-methyluridine-3'-phosphate
  modified_base 20: mod_base = OTHER; note = 2'-O-methyladenosine-3'-phosphate
  modified_base 21: mod_base = OTHER; note = 2'-O-methylcytidine-3'-phosphorothioate
  modified_base 22: mod_base = OTHER; note = 2'-O-methylguanosine-3'-phosphorothioate
  modified_base 23: mod_base = OTHER; note = 2'-O-methyluridine
  misc_feature 1..4: note = RNA
  misc_feature 6..23: note = RNA
  misc_feature 5: note = DNA
attggcatcaatgaagggtacgt

SEQ ID NO: 932 - RNA, 23 nt, synthetic construct
  source 1..23: mol_type = other RNA
  modified_base 1: mod_base = OTHER; note = 2'-O-methyladenosine-3'-phosphorothioate
  modified_base 2: mod_base = OTHER; note = 2'-deoxy-2'-fluoroadenosine-3'-phosphorothioate
  modified_base 3: mod_base = OTHER; note = 2'-O-methylcytidine-3'-phosphate
  modified_base 4: mod_base = OTHER; note = 2'-O-methyluridine-3'-phosphate
  modified_base 5: mod_base = OTHER; note = 2'-O-methyluridine-3'-phosphate
  modified_base 6: mod_base = OTHER; note = 2'-deoxy-2'-fluorouridine-3'-phosphate
  modified_base 7: mod_base = OTHER; note = 2'-O-methyladenosine-3'-phosphate
  modified_base 8: mod_base = OTHER; note = 2'-O-methylguanosine-3'-phosphate
  modified_base 9: mod_base = OTHER; note = 2'-O-methylguanosine-3'-phosphate
  modified_base 10: mod_base = OTHER; note = 2'-O-methylguanosine-3'-phosphate
  modified_base 11: mod_base = OTHER; note = 2'-O-methylcytidine-3'-phosphate
  modified_base 12: mod_base = OTHER; note = 2'-O-methyladenosine-3'-phosphate
  modified_base 13: mod_base = OTHER; note = 2'-O-methylguanosine-3'-phosphate
  modified_base 14: mod_base = OTHER; note = 2'-deoxy-2'-fluoroadenosine-3'-phosphate
  modified_base 15: mod_base = OTHER; note = 2'-O-methyluridine-3'-phosphate
  modified_base 16: mod_base = OTHER; note = 2'-deoxy-2'-fluoroguanosine-3'-phosphate
  modified_base 17: mod_base = OTHER; note = 2'-O-methyluridine-3'-phosphate
  modified_base 18: mod_base = OTHER; note = 2'-O-methylcytidine-3'-phosphate
  modified_base 19: mod_base = OTHER; note = 2'-O-methylguanosine-3'-phosphate
  modified_base 20: mod_base = OTHER; note = 2'-O-methyluridine-3'-phosphate
  modified_base 21: mod_base = OTHER; note = 2'-O-methyladenosine-3'-phosphorothioate
  modified_base 22: mod_base = OTHER; note = 2'-O-methylcytidine-3'-phosphorothioate
  modified_base 23: mod_base = OTHER; note = 2'-O-methyluridine
aactttagggcagatgtcgtact

SEQ ID NO: 933 - RNA, 23 nt, synthetic construct
  source 1..23: mol_type = other RNA
  modified_base 1: mod_base = OTHER; note = 2'-O-methyladenosine-3'-phosphorothioate
  modified_base 2: mod_base = OTHER; note = 2'-deoxy-2'-fluorouridine-3'-phosphorothioate
  modified_base 3: mod_base = OTHER; note = 2'-O-methylguanosine-3'-phosphate
  modified_base 4: mod_base = OTHER; note = 2'-O-methyladenosine-3'-phosphate
  modified_base 5: mod_base = OTHER; note = 2'-O-methylcytidine-3'-phosphate
  modified_base 6: mod_base = OTHER; note = 2'-deoxy-2'-fluorouridine-3'-phosphate
  modified_base 7: mod_base = OTHER; note = 2'-O-methyluridine-3'-phosphate
  modified_base 8: mod_base = OTHER; note = 2'-O-methyluridine-3'-phosphate
  modified_base 9: mod_base = OTHER; note = 2'-O-methyladenosine-3'-phosphate
  modified_base 10: mod_base = OTHER; note = 2'-O-methylguanosine-3'-phosphate
  modified_base 11: mod_base = OTHER; note = 2'-O-methylguanosine-3'-phosphate
  modified_base 12: mod_base = OTHER; note = 2'-O-methylguanosine-3'-phosphate
  modified_base 13: mod_base = OTHER; note = 2'-O-methylcytidine-3'-phosphate
  modified_base 14: mod_base = OTHER; note = 2'-deoxy-2'-fluoroadenosine-3'-phosphate
  modified_base 15: mod_base = OTHER; note = 2'-O-methylguanosine-3'-phosphate
  modified_base 16: mod_base = OTHER; note = 2'-deoxy-2'-fluoroadenosine-3'-phosphate
  modified_base 17: mod_base = OTHER; note = 2'-O-methyluridine-3'-phosphate
  modified_base 18: mod_base = OTHER; note = 2'-O-methylguanosine-3'-phosphate
  modified_base 19: mod_base = OTHER; note = 2'-O-methyluridine-3'-phosphate
  modified_base 20: mod_base = OTHER; note = 2'-O-methylcytidine-3'-phosphate
  modified_base 21: mod_base = OTHER; note = 2'-O-methylguanosine-3'-phosphorothioate
  modified_base 22: mod_base = OTHER; note = 2'-O-methyluridine-3'-phosphorothioate
  modified_base 23: mod_base = OTHER; note = 2'-O-methyladenosine
atgactttagggcagatgtcgta

SEQ ID NO: 934 - DNA, 23 bp, synthetic construct
  source 1..23: mol_type = other DNA
  modified_base 1: mod_base = OTHER; note = 2'-O-methyladenosine-3'-phosphorothioate
  modified_base 2: mod_base = OTHER; note = 2'-deoxy-2'-fluorouridine-3'-phosphorothioate
  modified_base 3: mod_base = OTHER; note = 2'-O-methyluridine-3'-phosphate
  modified_base 4: mod_base = OTHER; note = 2'-O-methylguanosine-3'-phosphate
  modified_base 6: mod_base = OTHER; note = 2'-O-methylcytidine-3'-phosphate
  modified_base 7: mod_base = OTHER; note = Thymidine-glycol nucleic acid (GNA), S-Isomer
  modified_base 8: mod_base = OTHER; note = 2'-O-methyluridine-3'-phosphate
  modified_base 9: mod_base = OTHER; note = 2'-O-methyluridine-3'-phosphate
  modified_base 10: mod_base = OTHER; note = 2'-O-methyladenosine-3'-phosphate
  modified_base 11: mod_base = OTHER; note = 2'-O-methylguanosine-3'-phosphate
  modified_base 12: mod_base = OTHER; note = 2'-O-methylguanosine-3'-phosphate
  modified_base 13: mod_base = OTHER; note = 2'-O-methylguanosine-3'-phosphate
  modified_base 14: mod_base = OTHER; note = 2'-deoxy-2'-fluorocytidine-3'-phosphate
  modified_base 15: mod_base = OTHER; note = 2'-O-methyladenosine-3'-phosphate
  modified_base 16: mod_base = OTHER; note = 2'-deoxy-2'-fluoroguanosine-3'-phosphate
  modified_base 17: mod_base = OTHER; note = 2'-O-methyladenosine-3'-phosphate
  modified_base 18: mod_base = OTHER; note = 2'-O-methyluridine-3'-phosphate
  modified_base 19: mod_base = OTHER; note = 2'-O-methylguanosine-3'-phosphate
  modified_base 20: mod_base = OTHER; note = 2'-O-methyluridine-3'-phosphate
  modified_base 21: mod_base = OTHER; note = 2'-O-methylcytidine-3'-phosphorothioate
  modified_base 22: mod_base = OTHER; note = 2'-O-methylguanosine-3'-phosphorothioate
  modified_base 23: mod_base = OTHER; note = 2'-O-methyluridine
  misc_feature 1..4: note = RNA
  misc_feature 6..23: note = RNA
  misc_feature 5: note = DNA
attgactttagggcagatgtcgt

SEQ ID NO: 935 - RNA, 23 nt, synthetic construct
  source 1..23: mol_type = other RNA
  modified_base 1: mod_base = OTHER; note = 2'-O-methyladenosine-3'-phosphorothioate
  modified_base 2: mod_base = OTHER; note = 2'-deoxy-2'-fluorocytidine-3'-phosphorothioate
  modified_base 3: mod_base = OTHER; note = 2'-O-methyluridine-3'-phosphate
  modified_base 4: mod_base = OTHER; note = 2'-O-methyluridine-3'-phosphate
  modified_base 5: mod_base = OTHER; note = 2'-O-methylguanosine-3'-phosphate
  modified_base 6: mod_base = OTHER; note = 2'-deoxy-2'-fluoroadenosine-3'-phosphate
  modified_base 7: mod_base = OTHER; note = 2'-O-methylcytidine-3'-phosphate
  modified_base 8: mod_base = OTHER; note = 2'-O-methyluridine-3'-phosphate
  modified_base 9: mod_base = OTHER; note = 2'-O-methyluridine-3'-phosphate
  modified_base 10: mod_base = OTHER; note = 2'-O-methyluridine-3'-phosphate
  modified_base 11: mod_base = OTHER; note = 2'-O-methyladenosine-3'-phosphate
  modified_base 12: mod_base = OTHER; note = 2'-O-methylguanosine-3'-phosphate
  modified_base 13: mod_base = OTHER; note = 2'-O-methylguanosine-3'-phosphate
  modified_base 14: mod_base = OTHER; note = 2'-deoxy-2'-fluoroguanosine-3'-phosphate
  modified_base 15: mod_base = OTHER; note = 2'-O-methylcytidine-3'-phosphate
  modified_base 16: mod_base = OTHER; note = 2'-deoxy-2'-fluoroadenosine-3'-phosphate
  modified_base 17: mod_base = OTHER; note = 2'-O-methylguanosine-3'-phosphate
  modified_base 18: mod_base = OTHER; note = 2'-O-methyladenosine-3'-phosphate
  modified_base 19: mod_base = OTHER; note = 2'-O-methyluridine-3'-phosphate
  modified_base 20: mod_base = OTHER; note = 2'-O-methylguanosine-3'-phosphate
  modified_base 21: mod_base = OTHER; note = 2'-O-methyluridine-3'-phosphorothioate
  modified_base 22: mod_base = OTHER; note = 2'-O-methylcytidine-3'-phosphorothioate
  modified_base 23: mod_base = OTHER; note = 2'-O-methylguanosine
acttgactttagggcagatgtcg

SEQ ID NO: 936 - RNA, 23 nt, synthetic construct
  source 1..23: mol_type = other RNA
  modified_base 1: mod_base = OTHER; note = 2'-O-methyladenosine-3'-phosphorothioate
  modified_base 2: mod_base = OTHER; note = 2'-deoxy-2'-fluoroguanosine-3'-phosphorothioate
  modified_base 3: mod_base = OTHER; note = 2'-O-methylguanosine-3'-phosphate
  modified_base 4: mod_base = OTHER; note = 2'-O-methyladenosine-3'-phosphate
  modified_base 5: mod_base = OTHER; note = 2'-O-methylcytidine-3'-phosphate
  modified_base 6: mod_base = OTHER; note = 2'-deoxy-2'-fluorouridine-3'-phosphate
  modified_base 7: mod_base = OTHER; note = 2'-O-methyluridine-3'-phosphate
  modified_base 8: mod_base = OTHER; note = 2'-O-methylguanosine-3'-phosphate
  modified_base 9: mod_base = OTHER; note = 2'-O-methyladenosine-3'-phosphate
  modified_base 10: mod_base = OTHER; note = 2'-O-methylcytidine-3'-phosphate
  modified_base 11: mod_base = OTHER; note = 2'-O-methyluridine-3'-phosphate
  modified_base 12: mod_base = OTHER; note = 2'-O-methyluridine-3'-phosphate
  modified_base 13: mod_base = OTHER; note = 2'-O-methyluridine-3'-phosphate
  modified_base 14: mod_base = OTHER; note = 2'-deoxy-2'-fluoroadenosine-3'-phosphate
  modified_base 15: mod_base = OTHER; note = 2'-O-methylguanosine-3'-phosphate
  modified_base 16: mod_base = OTHER; note = 2'-deoxy-2'-fluoroguanosine-3'-phosphate
  modified_base 17: mod_base = OTHER; note = 2'-O-methylguanosine-3'-phosphate
  modified_base 18: mod_base = OTHER; note = 2'-O-methylcytidine-3'-phosphate
  modified_base 19: mod_base = OTHER; note = 2'-O-methyladenosine-3'-phosphate
  modified_base 20: mod_base = OTHER; note = 2'-O-methylguanosine-3'-phosphate
  modified_base 21: mod_base = OTHER; note = 2'-O-methyladenosine-3'-phosphorothioate
  modified_base 22: mod_base = OTHER; note = 2'-O-methyluridine-3'-phosphorothioate
  modified_base 23: mod_base = OTHER; note = 2'-O-methylguanosine
aggacttgactttagggcagatg

SEQ ID NO: 937 - DNA, 23 bp, synthetic construct
  source 1..23: mol_type = other DNA
  modified_base 1: mod_base = OTHER; note = 2'-O-methyladenosine-3'-phosphorothioate
  modified_base 2: mod_base = OTHER; note = 2'-deoxy-2'-fluoroguanosine-3'-phosphorothioate
  modified_base 3: mod_base = OTHER; note = 2'-O-methylguanosine-3'-phosphate
  modified_base 4: mod_base = OTHER; note = 2'-O-methyladenosine-3'-phosphate
  modified_base 6: mod_base = OTHER; note = 2'-O-methyluridine-3'-phosphate
  modified_base 7: mod_base = OTHER; note = Thymidine-glycol nucleic acid (GNA), S-Isomer
  modified_base 8: mod_base = OTHER; note = 2'-O-methylguanosine-3'-phosphate
  modified_base 9: mod_base = OTHER; note = 2'-O-methyladenosine-3'-phosphate
  modified_base 10: mod_base = OTHER; note = 2'-O-methylcytidine-3'-phosphate
  modified_base 11: mod_base = OTHER; note = 2'-O-methyluridine-3'-phosphate
  modified_base 12: mod_base = OTHER; note = 2'-O-methyluridine-3'-phosphate
  modified_base 13: mod_base = OTHER; note = 2'-O-methyluridine-3'-phosphate
  modified_base 14: mod_base = OTHER; note = 2'-deoxy-2'-fluoroadenosine-3'-phosphate
  modified_base 15: mod_base = OTHER; note = 2'-O-methylguanosine-3'-phosphate
  modified_base 16: mod_base = OTHER; note = 2'-deoxy-2'-fluoroguanosine-3'-phosphate
  modified_base 17: mod_base = OTHER; note = 2'-O-methylguanosine-3'-phosphate
  modified_base 18: mod_base = OTHER; note = 2'-O-methylcytidine-3'-phosphate
  modified_base 19: mod_base = OTHER; note = 2'-O-methyladenosine-3'-phosphate
  modified_base 20: mod_base = OTHER; note = 2'-O-methylguanosine-3'-phosphate
  modified_base 21: mod_base = OTHER; note = 2'-O-methyladenosine-3'-phosphorothioate
  modified_base 22: mod_base = OTHER; note = 2'-O-methyluridine-3'-phosphorothioate
  modified_base 23: mod_base = OTHER; note = 2'-O-methylguanosine
  misc_feature 1..4: note = RNA
  misc_feature 6..23: note = RNA
  misc_feature 5: note = DNA
aggacttgactttagggcagatg

SEQ ID NO: 938 - DNA, 23 bp, synthetic construct
  source 1..23: mol_type = other DNA
  modified_base 1: mod_base = OTHER; note = 2'-O-methyladenosine-3'-phosphorothioate
  modified_base 2: mod_base = OTHER; note = 2'-deoxy-2'-fluorouridine-3'-phosphorothioate
  modified_base 3: mod_base = OTHER; note = 2'-O-methylguanosine-3'-phosphate
  modified_base 4: mod_base = OTHER; note = 2'-O-methylguanosine-3'-phosphate
  modified_base 6: mod_base = OTHER; note = 2'-O-methylcytidine-3'-phosphate
  modified_base 7: mod_base = OTHER; note = Thymidine-glycol nucleic acid (GNA), S-Isomer
  modified_base 8: mod_base = OTHER; note = 2'-O-methyluridine-3'-phosphate
  modified_base 9: mod_base = OTHER; note = 2'-O-methylguanosine-3'-phosphate
  modified_base 10: mod_base = OTHER; note = 2'-O-methyladenosine-3'-phosphate
  modified_base 11: mod_base = OTHER; note = 2'-O-methylcytidine-3'-phosphate
  modified_base 12: mod_base = OTHER; note = 2'-O-methyluridine-3'-phosphate
  modified_base 13: mod_base = OTHER; note = 2'-O-methyluridine-3'-phosphate
  modified_base 14: mod_base = OTHER; note = 2'-deoxy-2'-fluorouridine-3'-phosphate
  modified_base 15: mod_base = OTHER; note = 2'-O-methyladenosine-3'-phosphate
  modified_base 16: mod_base = OTHER; note = 2'-deoxy-2'-fluoroguanosine-3'-phosphate
  modified_base 17: mod_base = OTHER; note = 2'-O-methylguanosine-3'-phosphate
  modified_base 18: mod_base = OTHER; note = 2'-O-methylguanosine-3'-phosphate
  modified_base 19: mod_base = OTHER; note = 2'-O-methylcytidine-3'-phosphate
  modified_base 20: mod_base = OTHER; note = 2'-O-methyladenosine-3'-phosphate
  modified_base 21: mod_base = OTHER; note = 2'-O-methylguanosine-3'-phosphorothioate
  modified_base 22: mod_base = OTHER; note = 2'-O-methyladenosine-3'-phosphorothioate
  modified_base 23: mod_base = OTHER; note = 2'-O-methyluridine
  misc_feature 1..4: note = RNA
  misc_feature 6..23: note = RNA
  misc_feature 5: note = DNA
atggacttgactttagggcagat

SEQ ID NO: 939 - RNA, 23 nt, synthetic construct
  source 1..23: mol_type = other RNA
  modified_base 1: mod_base = OTHER; note = 2'-O-methyladenosine-3'-phosphorothioate
  modified_base 2: mod_base = OTHER; note = 2'-deoxy-2'-fluoroguanosine-3'-phosphorothioate
  modified_base 3: mod_base = OTHER; note = 2'-O-methyladenosine-3'-phosphate
  modified_base 4: mod_base = OTHER; note = 2'-O-methylguanosine-3'-phosphate
  modified_base 5: mod_base = OTHER; note = 2'-O-methylcytidine-3'-phosphate
  modified_base 6: mod_base = OTHER; note = 2'-deoxy-2'-fluorouridine-3'-phosphate
  modified_base 7: mod_base = OTHER; note = 2'-O-methyluridine-3'-phosphate
  modified_base 8: mod_base = OTHER; note = 2'-O-methylguanosine-3'-phosphate
  modified_base 9: mod_base = OTHER; note = 2'-O-methylguanosine-3'-phosphate
  modified_base 10: mod_base = OTHER; note = 2'-O-methyluridine-3'-phosphate
  modified_base 11: mod_base = OTHER; note = 2'-O-methylguanosine-3'-phosphate
  modified_base 12: mod_base = OTHER; note = 2'-O-methyladenosine-3'-phosphate
  modified_base 13: mod_base = OTHER; note = 2'-O-methyluridine-3'-phosphate
  modified_base 14: mod_base = OTHER; note = 2'-deoxy-2'-fluoroguanosine-3'-phosphate
  modified_base 15: mod_base = OTHER; note = 2'-O-methyluridine-3'-phosphate
  modified_base 16: mod_base = OTHER; note = 2'-deoxy-2'-fluorocytidine-3'-phosphate
  modified_base 17: mod_base = OTHER; note = 2'-O-methylcytidine-3'-phosphate
  modified_base 18: mod_base = OTHER; note = 2'-O-methyladenosine-3'-phosphate
  modified_base 19: mod_base = OTHER; note = 2'-O-methylcytidine-3'-phosphate
  modified_base 20: mod_base = OTHER; note = 2'-O-methyladenosine-3'-phosphate
  modified_base 21: mod_base = OTHER; note = 2'-O-methyluridine-3'-phosphorothioate
  modified_base 22: mod_base = OTHER; note = 2'-O-methylguanosine-3'-phosphorothioate
  modified_base 23: mod_base = OTHER; note = 2'-O-methyladenosine
agagcttggtgatgtccacatga

SEQ ID NO: 940 - DNA, 23 bp, synthetic construct
  source 1..23: mol_type = other DNA
  modified_base 1: mod_base = OTHER; note = 2'-O-methyladenosine-3'-phosphorothioate
  modified_base 2: mod_base = OTHER; note = 2'-deoxy-2'-fluoroguanosine-3'-phosphorothioate
  modified_base 3: mod_base = OTHER; note = 2'-O-methyladenosine-3'-phosphate
  modified_base 4: mod_base = OTHER; note = 2'-O-methylguanosine-3'-phosphate
  modified_base 6: mod_base = OTHER; note = 2'-O-methyluridine-3'-phosphate
  modified_base 7: mod_base = OTHER; note = Thymidine-glycol nucleic acid (GNA), S-Isomer
  modified_base 8: mod_base = OTHER; note = 2'-O-methylguanosine-3'-phosphate
  modified_base 9: mod_base = OTHER; note = 2'-O-methylguanosine-3'-phosphate
  modified_base 10: mod_base = OTHER; note = 2'-O-methyluridine-3'-phosphate
  modified_base 11: mod_base = OTHER; note = 2'-O-methylguanosine-3'-phosphate
  modified_base 12: mod_base = OTHER; note = 2'-O-methyladenosine-3'-phosphate
  modified_base 13: mod_base = OTHER; note = 2'-O-methyluridine-3'-phosphate
  modified_base 14: mod_base = OTHER; note = 2'-deoxy-2'-fluoroguanosine-3'-phosphate
  modified_base 15: mod_base = OTHER; note = 2'-O-methyluridine-3'-phosphate
  modified_base 16: mod_base = OTHER; note = 2'-deoxy-2'-fluorocytidine-3'-phosphate
  modified_base 17: mod_base = OTHER; note = 2'-O-methylcytidine-3'-phosphate
  modified_base 18: mod_base = OTHER; note = 2'-O-methyladenosine-3'-phosphate
  modified_base 19: mod_base = OTHER; note = 2'-O-methylcytidine-3'-phosphate
  modified_base 20: mod_base = OTHER; note = 2'-O-methyladenosine-3'-phosphate
  modified_base 21: mod_base = OTHER; note = 2'-O-methyluridine-3'-phosphorothioate
  modified_base 22: mod_base = OTHER; note = 2'-O-methylguanosine-3'-phosphorothioate
  modified_base 23: mod_base = OTHER; note = 2'-O-methyladenosine
  misc_feature 1..4: note = RNA
  misc_feature 6..23: note = RNA
  misc_feature 5: note = DNA
agagcttggtgatgtccacatga

SEQ ID NO: 941 - DNA, 23 bp, synthetic construct
  source 1..23: mol_type = other DNA
  modified_base 1: mod_base = OTHER; note = 2'-O-methyladenosine-3'-phosphorothioate
  modified_base 2: mod_base = OTHER; note = 2'-deoxy-2'-fluorouridine-3'-phosphorothioate
  modified_base 3: mod_base = OTHER; note = 2'-O-methylguanosine-3'-phosphate
  modified_base 4: mod_base = OTHER; note = 2'-O-methyladenosine-3'-phosphate
  modified_base 6: mod_base = OTHER; note = 2'-O-methylcytidine-3'-phosphate
  modified_base 7: mod_base = OTHER; note = Thymidine-glycol nucleic acid (GNA), S-Isomer
  modified_base 8: mod_base = OTHER; note = 2'-O-methyluridine-3'-phosphate
  modified_base 9: mod_base = OTHER; note = 2'-O-methylguanosine-3'-phosphate
  modified_base 10: mod_base = OTHER; note = 2'-O-methylguanosine-3'-phosphate
  modified_base 11: mod_base = OTHER; note = 2'-O-methyluridine-3'-phosphate
  modified_base 12: mod_base = OTHER; note = 2'-O-methylguanosine-3'-phosphate
  modified_base 13: mod_base = OTHER; note = 2'-O-methyladenosine-3'-phosphate
  modified_base 14: mod_base = OTHER; note = 2'-deoxy-2'-fluorouridine-3'-phosphate
  modified_base 15: mod_base = OTHER; note = 2'-O-methylguanosine-3'-phosphate
  modified_base 16: mod_base = OTHER; note = 2'-deoxy-2'-fluorouridine-3'-phosphate
  modified_base 17: mod_base = OTHER; note = 2'-O-methylcytidine-3'-phosphate
  modified_base 18: mod_base = OTHER; note = 2'-O-methylcytidine-3'-phosphate
  modified_base 19: mod_base = OTHER; note = 2'-O-methyladenosine-3'-phosphate
  modified_base 20: mod_base = OTHER; note = 2'-O-methylcytidine-3'-phosphate
  modified_base 21: mod_base = OTHER; note = 2'-O-methyladenosine-3'-phosphorothioate
  modified_base 22: mod_base = OTHER; note = 2'-O-methyluridine-3'-phosphorothioate
  modified_base 23: mod_base = OTHER; note = 2'-O-methylguanosine
  misc_feature 1..4: note = RNA
  misc_feature 6..23: note = RNA
  misc_feature 5: note = DNA
atgagcttggtgatgtccacatg

SEQ ID NO: 942 - DNA, 23 bp, synthetic construct
  source 1..23: mol_type = other DNA
  modified_base 1: mod_base = OTHER; note = 2'-O-methyladenosine-3'-phosphorothioate
  modified_base 2: mod_base = OTHER; note = 2'-deoxy-2'-fluorocytidine-3'-phosphorothioate
  modified_base 3: mod_base = OTHER; note = 2'-O-methylcytidine-3'-phosphate
  modified_base 4: mod_base = OTHER; note = 2'-O-methylcytidine-3'-phosphate
  modified_base 6: mod_base = OTHER; note = 2'-O-methylguanosine-3'-phosphate
  modified_base 7: mod_base = OTHER; note = Thymidine-glycol nucleic acid (GNA), S-Isomer
  modified_base 8: mod_base = OTHER; note = 2'-O-methylguanosine-3'-phosphate
  modified_base 9: mod_base = OTHER; note = 2'-O-methylcytidine-3'-phosphate
  modified_base 10: mod_base = OTHER; note = 2'-O-methyladenosine-3'-phosphate
  modified_base 11: mod_base = OTHER; note = 2'-O-methylguanosine-3'-phosphate
  modified_base 12: mod_base = OTHER; note = 2'-O-methyladenosine-3'-phosphate
  modified_base 13: mod_base = OTHER; note = 2'-O-methylguanosine-3'-phosphate
  modified_base 14: mod_base = OTHER; note = 2'-deoxy-2'-fluoroguanosine-3'-phosphate
  modified_base 15: mod_base = OTHER; note = 2'-O-methylcytidine-3'-phosphate
  modified_base 16: mod_base = OTHER; note = 2'-deoxy-2'-fluoroguanosine-3'-phosphate
  modified_base 17: mod_base = OTHER; note = 2'-O-methyluridine-3'-phosphate
  modified_base 18: mod_base = OTHER; note = 2'-O-methyladenosine-3'-phosphate
  modified_base 19: mod_base = OTHER; note = 2'-O-methylguanosine-3'-phosphate
  modified_base 20: mod_base = OTHER; note = 2'-O-methyladenosine-3'-phosphate
  modified_base 21: mod_base = OTHER; note = 2'-O-methylcytidine-3'-phosphorothioate
  modified_base 22: mod_base = OTHER; note = 2'-O-methyluridine-3'-phosphorothioate
  modified_base 23: mod_base = OTHER; note = 2'-O-methylguanosine
  misc_feature 1..4: note = RNA
  misc_feature 6..23: note = RNA
  misc_feature 5: note = DNA
accctgtgcagaggcgtagactg

SEQ ID NO: 943 - DNA, 23 bp, synthetic construct
  source 1..23: mol_type = other DNA
  modified_base 1: mod_base = OTHER; note = 2'-O-methyladenosine-3'-phosphorothioate
  modified_base 2: mod_base = OTHER; note = 2'-deoxy-2'-fluoroadenosine-3'-phosphorothioate
  modified_base 3: mod_base = OTHER; note = 2'-O-methylguanosine-3'-phosphate
  modified_base 4: mod_base = OTHER; note = 2'-O-methyladenosine-3'-phosphate
  modified_base 6: mod_base = OTHER; note = 2'-O-methylguanosine-3'-phosphate
  modified_base 7: mod_base = OTHER; note = Thymidine-glycol nucleic acid (GNA), S-Isomer
  modified_base 8: mod_base = OTHER; note = 2'-O-methyluridine-3'-phosphate
  modified_base 9: mod_base = OTHER; note = 2'-O-methylcytidine-3'-phosphate
  modified_base 10: mod_base = OTHER; note = 2'-O-methylcytidine-3'-phosphate
  modified_base 11: mod_base = OTHER; note = 2'-O-methylcytidine-3'-phosphate
  modified_base 12: mod_base = OTHER; note = 2'-O-methyluridine-3'-phosphate
  modified_base 13: mod_base = OTHER; note = 2'-O-methylguanosine-3'-phosphate
  modified_base 14: mod_base = OTHER; note = 2'-deoxy-2'-fluorouridine-3'-phosphate
  modified_base 15: mod_base = OTHER; note = 2'-O-methylguanosine-3'-phosphate
  modified_base 16: mod_base = OTHER; note = 2'-deoxy-2'-fluorocytidine-3'-phosphate
  modified_base 17: mod_base = OTHER; note = 2'-O-methyladenosine-3'-phosphate
  modified_base 18: mod_base = OTHER; note = 2'-O-methylguanosine-3'-phosphate
  modified_base 19: mod_base = OTHER; note = 2'-O-methyladenosine-3'-phosphate
  modified_base 20: mod_base = OTHER; note = 2'-O-methylguanosine-3'-phosphate
  modified_base 21: mod_base = OTHER; note = 2'-O-methylguanosine-3'-phosphorothioate
  modified_base 22: mod_base = OTHER; note = 2'-O-methylcytidine-3'-phosphorothioate
  modified_base 23: mod_base = OTHER; note = 2'-O-methylguanosine
  misc_feature 1..4: note = RNA
  misc_feature 6..23: note = RNA
  misc_feature 5: note = DNA
aagaggttccctgtgcagaggcg

SEQ ID NO: 944 - RNA, 23 nt, synthetic construct
  source 1..23: mol_type = other RNA
  modified_base 1: mod_base = OTHER; note = 2'-O-methyladenosine-3'-phosphorothioate
  modified_base 2: mod_base = OTHER; note = 2'-deoxy-2'-fluoroadenosine-3'-phosphorothioate
  modified_base 3: mod_base = OTHER; note = 2'-O-methylguanosine-3'-phosphate
  modified_base 4: mod_base = OTHER; note = 2'-O-methylguanosine-3'-phosphate
  modified_base 5: mod_base = OTHER; note = 2'-O-methyluridine-3'-phosphate
  modified_base 6: mod_base = OTHER; note = 2'-deoxy-2'-fluoroadenosine-3'-phosphate
  modified_base 7: mod_base = OTHER; note = 2'-O-methylguanosine-3'-phosphate
  modified_base 8: mod_base = OTHER; note = 2'-O-methyladenosine-3'-phosphate
  modified_base 9: mod_base = OTHER; note = 2'-O-methylguanosine-3'-phosphate
  modified_base 10: mod_base = OTHER; note = 2'-O-methylguanosine-3'-phosphate
  modified_base 11: mod_base = OTHER; note = 2'-O-methyluridine-3'-phosphate
  modified_base 12: mod_base = OTHER; note = 2'-O-methyluridine-3'-phosphate
  modified_base 13: mod_base = OTHER; note = 2'-O-methylcytidine-3'-phosphate
  modified_base 14: mod_base = OTHER; note = 2'-deoxy-2'-fluorocytidine-3'-phosphate
  modified_base 15: mod_base = OTHER; note = 2'-O-methylcytidine-3'-phosphate
  modified_base 16: mod_base = OTHER; note = 2'-deoxy-2'-fluorouridine-3'-phosphate
  modified_base 17: mod_base = OTHER; note = 2'-O-methylguanosine-3'-phosphate
  modified_base 18: mod_base = OTHER; note = 2'-O-methyluridine-3'-phosphate
  modified_base 19: mod_base = OTHER; note = 2'-O-methylguanosine-3'-phosphate
  modified_base 20: mod_base = OTHER; note = 2'-O-methylcytidine-3'-phosphate
  modified_base 21: mod_base = OTHER; note = 2'-O-methyladenosine-3'-phosphorothioate
  modified_base 22: mod_base = OTHER; note = 2'-O-methylguanosine-3'-phosphorothioate
  modified_base 23: mod_base = OTHER; note = 2'-O-methyladenosine
aaggtagaggttccctgtgcaga

SEQ ID NO: 945 - RNA, 23 nt, synthetic construct
  source 1..23: mol_type = other RNA
  modified_base 1: mod_base = OTHER; note = 2'-O-methyladenosine-3'-phosphorothioate
  modified_base 2: mod_base = OTHER; note = 2'-deoxy-2'-fluoroadenosine-3'-phosphorothioate
  modified_base 3: mod_base = OTHER; note = 2'-O-methyladenosine-3'-phosphate
  modified_base 4: mod_base = OTHER; note = 2'-O-methylguanosine-3'-phosphate
  modified_base 5: mod_base = OTHER; note = 2'-O-methylguanosine-3'-phosphate
  modified_base 6: mod_base = OTHER; note = 2'-deoxy-2'-fluorouridine-3'-phosphate
  modified_base 7: mod_base = OTHER; note = 2'-O-methyladenosine-3'-phosphate
  modified_base 8: mod_base = OTHER; note = 2'-O-methylguanosine-3'-phosphate
  modified_base 9: mod_base = OTHER; note = 2'-O-methyladenosine-3'-phosphate
  modified_base 10: mod_base = OTHER; note = 2'-O-methylguanosine-3'-phosphate
  modified_base 11: mod_base = OTHER; note = 2'-O-methylguanosine-3'-phosphate
  modified_base 12: mod_base = OTHER; note = 2'-O-methyluridine-3'-phosphate
  modified_base 13: mod_base = OTHER; note = 2'-O-methyluridine-3'-phosphate
  modified_base 14: mod_base = OTHER; note = 2'-deoxy-2'-fluorocytidine-3'-phosphate
  modified_base 15: mod_base = OTHER; note = 2'-O-methylcytidine-3'-phosphate
  modified_base 16: mod_base = OTHER; note = 2'-deoxy-2'-fluorocytidine-3'-phosphate
  modified_base 17: mod_base = OTHER; note = 2'-O-methyluridine-3'-phosphate
  modified_base 18: mod_base = OTHER; note = 2'-O-methylguanosine-3'-phosphate
  modified_base 19: mod_base = OTHER; note = 2'-O-methyluridine-3'-phosphate
  modified_base 20: mod_base = OTHER; note = 2'-O-methylguanosine-3'-phosphate
  modified_base 21: mod_base = OTHER; note = 2'-O-methylcytidine-3'-phosphorothioate
  modified_base 22: mod_base = OTHER; note = 2'-O-methyladenosine-3'-phosphorothioate
  modified_base 23: mod_base = OTHER; note = 2'-O-methylguanosine
aaaggtagaggttccctgtgcag

SEQ ID NO: 946 - DNA, 23 bp, synthetic construct
  source 1..23: mol_type = other DNA
  modified_base 1: mod_base = OTHER; note = 2'-O-methyladenosine-3'-phosphorothioate
  modified_base 2: mod_base = OTHER; note = 2'-deoxy-2'-fluoroguanosine-3'-phosphorothioate
  modified_base 3: mod_base = OTHER; note = 2'-O-methyladenosine-3'-phosphate
  modified_base 4: mod_base = OTHER; note = 2'-O-methyladenosine-3'-phosphate
  modified_base 6: mod_base = OTHER; note = 2'-O-methylguanosine-3'-phosphate
  modified_base 7: mod_base = OTHER; note = Thymidine-glycol nucleic acid (GNA), S-Isomer
  modified_base 8: mod_base = OTHER; note = 2'-O-methyladenosine-3'-phosphate
  modified_base 9: mod_base = OTHER; note = 2'-O-methylguanosine-3'-phosphate
  modified_base 10: mod_base = OTHER; note = 2'-O-methyladenosine-3'-phosphate
  modified_base 11: mod_base = OTHER; note = 2'-O-methylguanosine-3'-phosphate
  modified_base 12: mod_base = OTHER; note = 2'-O-methylguanosine-3'-phosphate
  modified_base 13: mod_base = OTHER; note = 2'-O-methyluridine-3'-phosphate
  modified_base 14: mod_base = OTHER; note = 2'-deoxy-2'-fluorouridine-3'-phosphate
  modified_base 15: mod_base = OTHER; note = 2'-O-methylcytidine-3'-phosphate
  modified_base 16: mod_base = OTHER; note = 2'-deoxy-2'-fluorocytidine-3'-phosphate
  modified_base 17: mod_base = OTHER; note = 2'-O-methylcytidine-3'-phosphate
  modified_base 18: mod_base = OTHER; note = 2'-O-methyluridine-3'-phosphate
  modified_base 19: mod_base = OTHER; note = 2'-O-methylguanosine-3'-phosphate
  modified_base 20: mod_base = OTHER; note = 2'-O-methyluridine-3'-phosphate
  modified_base 21: mod_base = OTHER; note = 2'-O-methylguanosine-3'-phosphorothioate
  modified_base 22: mod_base = OTHER; note = 2'-O-methylcytidine-3'-phosphorothioate
  modified_base 23: mod_base = OTHER; note = 2'-O-methyladenosine
  misc_feature 1..4: note = RNA
  misc_feature 6..23: note = RNA
  misc_feature 5: note = DNA
agaaggtagaggttccctgtgca

SEQ ID NO: 947 - RNA, 23 nt, synthetic construct
  source 1..23: mol_type = other RNA
  modified_base 1: mod_base = OTHER; note = 2'-O-methyladenosine-3'-phosphorothioate
  modified_base 2: mod_base = OTHER; note = 2'-deoxy-2'-fluoroguanosine-3'-phosphorothioate
  modified_base 3: mod_base = OTHER; note = 2'-O-methyladenosine-3'-phosphate
  modified_base 4: mod_base = OTHER; note = 2'-O-methylguanosine-3'-phosphate
  modified_base 5: mod_base = OTHER; note = 2'-O-methyladenosine-3'-phosphate
  modified_base 6: mod_base = OTHER; note = 2'-deoxy-2'-fluoroadenosine-3'-phosphate
  modified_base 7: mod_base = OTHER; note = 2'-O-methylguanosine-3'-phosphate
  modified_base 8: mod_base = OTHER; note = 2'-O-methylguanosine-3'-phosphate
  modified_base 9: mod_base = OTHER; note = 2'-O-methyluridine-3'-phosphate
  modified_base 10: mod_base = OTHER; note = 2'-O-methyladenosine-3'-phosphate
  modified_base 11: mod_base = OTHER; note = 2'-O-methylguanosine-3'-phosphate
  modified_base 12: mod_base = OTHER; note = 2'-O-methyladenosine-3'-phosphate
  modified_base 13: mod_base = OTHER; note = 2'-O-methylguanosine-3'-phosphate
  modified_base 14: mod_base = OTHER; note = 2'-deoxy-2'-fluoroguanosine-3'-phosphate
  modified_base 15: mod_base = OTHER; note = 2'-O-methyluridine-3'-phosphate
  modified_base 16: mod_base = OTHER; note = 2'-deoxy-2'-fluorouridine-3'-phosphate
  modified_base 17: mod_base = OTHER; note = 2'-O-methylcytidine-3'-phosphate
  modified_base 18: mod_base = OTHER; note = 2'-O-methylcytidine-3'-phosphate
  modified_base 19: mod_base = OTHER; note = 2'-O-methylcytidine-3'-phosphate
  modified_base 20: mod_base = OTHER; note = 2'-O-methyluridine-3'-phosphate
  modified_base 21: mod_base = OTHER; note = 2'-O-methylguanosine-3'-phosphorothioate
  modified_base 22: mod_base = OTHER; note = 2'-O-methyluridine-3'-phosphorothioate
  modified_base 23: mod_base = OTHER; note = 2'-O-methylguanosine
agagaaggtagaggttccctgtg

SEQ ID NO: 948 - RNA, 23 nt, synthetic construct
  source 1..23: mol_type = other RNA
  modified_base 1: mod_base = OTHER; note = 2'-O-methyladenosine-3'-phosphorothioate
  modified_base 2: mod_base = OTHER; note = 2'-deoxy-2'-fluoroadenosine-3'-phosphorothioate
  modified_base 3: mod_base = OTHER; note = 2'-O-methylguanosine-3'-phosphate
  modified_base 4: mod_base = OTHER; note = 2'-O-methyladenosine-3'-phosphate
  modified_base 5: mod_base = OTHER; note = 2'-O-methylguanosine-3'-phosphate
  modified_base 6: mod_base = OTHER; note = 2'-deoxy-2'-fluoroadenosine-3'-phosphate
  modified_base 7: mod_base = OTHER; note = 2'-O-methyladenosine-3'-phosphate
  modified_base 8: mod_base = OTHER; note = 2'-O-methylguanosine-3'-phosphate
  modified_base 9: mod_base = OTHER; note = 2'-O-methylguanosine-3'-phosphate
  modified_base 10: mod_base = OTHER; note = 2'-O-methyluridine-3'-phosphate
  modified_base 11: mod_base = OTHER; note = 2'-O-methyladenosine-3'-phosphate
  modified_base 12: mod_base = OTHER; note = 2'-O-methylguanosine-3'-phosphate
  modified_base 13: mod_base = OTHER; note = 2'-O-methyladenosine-3'-phosphate
  modified_base 14: mod_base = OTHER; note = 2'-deoxy-2'-fluoroguanosine-3'-phosphate
  modified_base 15: mod_base = OTHER; note = 2'-O-methylguanosine-3'-phosphate
  modified_base 16: mod_base = OTHER; note = 2'-deoxy-2'-fluorouridine-3'-phosphate
  modified_base 17: mod_base = OTHER; note = 2'-O-methyluridine-3'-phosphate
  modified_base 18: mod_base = OTHER; note = 2'-O-methylcytidine-3'-phosphate
  modified_base 19: mod_base = OTHER; note = 2'-O-methylcytidine-3'-phosphate
  modified_base 20: mod_base = OTHER; note = 2'-O-methylcytidine-3'-phosphate
  modified_base 21: mod_base = OTHER; note = 2'-O-methyluridine-3'-phosphorothioate
  modified_base 22: mod_base = OTHER; note = 2'-O-methylguanosine-3'-phosphorothioate
  modified_base 23: mod_base = OTHER; note = 2'-O-methyluridine
aagagaaggtagaggttccctgt

SEQ ID NO: 949 - RNA, 23 nt, synthetic construct
  source 1..23: mol_type = other RNA
  modified_base 1: mod_base = OTHER; note = 2'-O-methyladenosine-3'-phosphorothioate
  modified_base 2: mod_base = OTHER; note = 2'-deoxy-2'-fluoroguanosine-3'-phosphorothioate
  modified_base 3: mod_base = OTHER; note = 2'-O-methyladenosine-3'-phosphate
  modified_base 4: mod_base = OTHER; note = 2'-O-methylguanosine-3'-phosphate
  modified_base 5: mod_base = OTHER; note = 2'-O-methyladenosine-3'-phosphate
  modified_base 6: mod_base = OTHER; note = 2'-deoxy-2'-fluoroguanosine-3'-phosphate
  modified_base 7: mod_base = OTHER; note = 2'-O-methyladenosine-3'-phosphate
  modified_base 8: mod_base = OTHER; note = 2'-O-methyladenosine-3'-phosphate
  modified_base 9: mod_base = OTHER; note = 2'-O-methylguanosine-3'-phosphate
  modified_base 10: mod_base = OTHER; note = 2'-O-methylguanosine-3'-phosphate
  modified_base 11: mod_base = OTHER; note = 2'-O-methyluridine-3'-phosphate
  modified_base 12: mod_base = OTHER; note = 2'-O-methyladenosine-3'-phosphate
  modified_base 13: mod_base = OTHER; note = 2'-O-methylguanosine-3'-phosphate
  modified_base 14: mod_base = OTHER; note = 2'-deoxy-2'-fluoroadenosine-3'-phosphate
  modified_base 15: mod_base = OTHER; note = 2'-O-methylguanosine-3'-phosphate
  modified_base 16: mod_base = OTHER; note = 2'-deoxy-2'-fluoroguanosine-3'-phosphate
  modified_base 17: mod_base = OTHER; note = 2'-O-methyluridine-3'-phosphate
  modified_base 18: mod_base = OTHER; note = 2'-O-methyluridine-3'-phosphate
  modified_base 19: mod_base = OTHER; note = 2'-O-methylcytidine-3'-phosphate
  modified_base 20: mod_base = OTHER; note = 2'-O-methylcytidine-3'-phosphate
  modified_base 21: mod_base = OTHER; note = 2'-O-methylcytidine-3'-phosphorothioate
  modified_base 22: mod_base = OTHER; note = 2'-O-methyluridine-3'-phosphorothioate
  modified_base 23: mod_base = OTHER; note = 2'-O-methylguanosine
agagagaaggtagaggttccctg

SEQ ID NO: 950 - DNA, 23 bp, synthetic construct
  source 1..23: mol_type = other DNA
  modified_base 1: mod_base = OTHER; note = 2'-O-methyladenosine-3'-phosphorothioate
  modified_base 2: mod_base = OTHER; note = 2'-deoxy-2'-fluoroadenosine-3'-phosphorothioate
  modified_base 3: mod_base = OTHER; note = 2'-O-methyluridine-3'-phosphate
  modified_base 4: mod_base = OTHER; note = 2'-O-methyladenosine-3'-phosphate
  modified_base 6: mod_base = OTHER; note = 2'-O-methylcytidine-3'-phosphate
  modified_base 7: mod_base = OTHER; note = Thymidine-glycol nucleic acid (GNA), S-Isomer
  modified_base 8: mod_base = OTHER; note = 2'-O-methylcytidine-3'-phosphate
  modified_base 9: mod_base = OTHER; note = 2'-O-methyluridine-3'-phosphate
  modified_base 10: mod_base = OTHER; note = 2'-O-methylcytidine-3'-phosphate
  modified_base 11: mod_base = OTHER; note = 2'-O-methylcytidine-3'-phosphate
  modified_base 12: mod_base = OTHER; note = 2'-O-methylcytidine-3'-phosphate
  modified_base 13: mod_base = OTHER; note = 2'-O-methyladenosine-3'-phosphate
  modified_base 14: mod_base = OTHER; note = 2'-deoxy-2'-fluoroguanosine-3'-phosphate
  modified_base 15: mod_base = OTHER; note = 2'-O-methylcytidine-3'-phosphate
  modified_base 16: mod_base = OTHER; note = 2'-deoxy-2'-fluoroadenosine-3'-phosphate
  modified_base 17: mod_base = OTHER; note = 2'-O-methylcytidine-3'-phosphate
  modified_base 18: mod_base = OTHER; note = 2'-O-methylcytidine-3'-phosphate
  modified_base 19: mod_base = OTHER; note = 2'-O-methyluridine-3'-phosphate
  modified_base 20: mod_base = OTHER; note = 2'-O-methyluridine-3'-phosphate
  modified_base 21: mod_base = OTHER; note = 2'-O-methylguanosine-3'-phosphorothioate
  modified_base 22: mod_base = OTHER; note = 2'-O-methyladenosine-3'-phosphorothioate
  modified_base 23: mod_base = OTHER; note = 2'-O-methylguanosine
  misc_feature 1..4: note = RNA
  misc_feature 6..23: note = RNA
  misc_feature 5: note = DNA
aatatctctcccagcaccttgag

SEQ ID NO: 951 - RNA, 23 nt, synthetic construct
  source 1..23: mol_type = other RNA
  modified_base 1: mod_base = OTHER; note = 2'-O-methyladenosine-3'-phosphorothioate
  modified_base 2: mod_base = OTHER; note = 2'-deoxy-2'-fluorocytidine-3'-phosphorothioate
  modified_base 3: mod_base = OTHER; note = 2'-O-methyladenosine-3'-phosphate
  modified_base 4: mod_base = OTHER; note = 2'-O-methyluridine-3'-phosphate
  modified_base 5: mod_base = OTHER; note = 2'-O-methyladenosine-3'-phosphate
  modified_base 6: mod_base = OTHER; note = 2'-deoxy-2'-fluorouridine-3'-phosphate
  modified_base 7: mod_base = OTHER; note = 2'-O-methylcytidine-3'-phosphate
  modified_base 8: mod_base = OTHER; note = 2'-O-methyluridine-3'-phosphate
  modified_base 9: mod_base = OTHER; note = 2'-O-methylcytidine-3'-phosphate
  modified_base 10: mod_base = OTHER; note = 2'-O-methyluridine-3'-phosphate
  modified_base 11: mod_base = OTHER; note = 2'-O-methylcytidine-3'-phosphate
  modified_base 12: mod_base = OTHER; note = 2'-O-methylcytidine-3'-phosphate
  modified_base 13: mod_base = OTHER; note = 2'-O-methylcytidine-3'-phosphate
  modified_base 14: mod_base = OTHER; note = 2'-deoxy-2'-fluoroadenosine-3'-phosphate
  modified_base 15: mod_base = OTHER; note = 2'-O-methylguanosine-3'-phosphate
  modified_base 16: mod_base = OTHER; note = 2'-deoxy-2'-fluorocytidine-3'-phosphate
  modified_base 17: mod_base = OTHER; note = 2'-O-methyladenosine-3'-phosphate
  modified_base 18: mod_base = OTHER; note = 2'-O-methylcytidine-3'-phosphate
  modified_base 19: mod_base = OTHER; note = 2'-O-methylcytidine-3'-phosphate
  modified_base 20: mod_base = OTHER; note = 2'-O-methyluridine-3'-phosphate
  modified_base 21: mod_base = OTHER; note = 2'-O-methyluridine-3'-phosphorothioate
  modified_base 22: mod_base = OTHER; note = 2'-O-methylguanosine-3'-phosphorothioate
  modified_base 23: mod_base = OTHER; note = 2'-O-methyladenosine
acatatctctcccagcaccttga

SEQ ID NO: 952 - RNA, 23 nt, synthetic construct
  source 1..23: mol_type = other RNA
  modified_base 1: mod_base = OTHER; note = 2'-O-methyladenosine-3'-phosphorothioate
  modified_base 2: mod_base = OTHER; note = 2'-deoxy-2'-fluoroguanosine-3'-phosphorothioate
  modified_base 3: mod_base = OTHER; note = 2'-O-methylcytidine-3'-phosphate
  modified_base 4: mod_base = OTHER; note = 2'-O-methyladenosine-3'-phosphate
  modified_base 5: mod_base = OTHER; note = 2'-O-methyluridine-3'-phosphate
  modified_base 6: mod_base = OTHER; note = 2'-deoxy-2'-fluoroadenosine-3'-phosphate
  modified_base 7: mod_base = OTHER; note = 2'-O-methyluridine-3'-phosphate
  modified_base 8: mod_base = OTHER; note = 2'-O-methylcytidine-3'-phosphate
  modified_base 9: mod_base = OTHER; note = 2'-O-methyluridine-3'-phosphate
  modified_base 10: mod_base = OTHER; note = 2'-O-methylcytidine-3'-phosphate
  modified_base 11: mod_base = OTHER; note = 2'-O-methyluridine-3'-phosphate
  modified_base 12: mod_base = OTHER; note = 2'-O-methylcytidine-3'-phosphate
  modified_base 13: mod_base = OTHER; note = 2'-O-methylcytidine-3'-phosphate
  modified_base 14: mod_base = OTHER; note = 2'-deoxy-2'-fluorocytidine-3'-phosphate
  modified_base 15: mod_base = OTHER; note = 2'-O-methyladenosine-3'-phosphate
  modified_base 16: mod_base = OTHER; note = 2'-deoxy-2'-fluoroguanosine-3'-phosphate
  modified_base 17: mod_base = OTHER; note = 2'-O-methylcytidine-3'-phosphate
  modified_base 18: mod_base = OTHER; note = 2'-O-methyladenosine-3'-phosphate
  modified_base 19: mod_base = OTHER; note = 2'-O-methylcytidine-3'-phosphate
  modified_base 20: mod_base = OTHER; note = 2'-O-methylcytidine-3'-phosphate
  modified_base 21: mod_base = OTHER; note = 2'-O-methyluridine-3'-phosphorothioate
  modified_base 22: mod_base = OTHER; note = 2'-O-methyluridine-3'-phosphorothioate
  modified_base 23: mod_base = OTHER; note = 2'-O-methylguanosine
agcatatctctcccagcaccttg

SEQ ID NO: 953 - RNA, 23 nt, synthetic construct
  source 1..23: mol_type = other RNA
  modified_base 1: mod_base = OTHER; note = 2'-O-methyladenosine-3'-phosphorothioate
  modified_base 2: mod_base = OTHER; note = 2'-deoxy-2'-fluoroguanosine-3'-phosphorothioate
  modified_base 3: mod_base = OTHER; note = 2'-O-methylguanosine-3'-phosphate
  modified_base 4: mod_base = OTHER; note = 2'-O-methylcytidine-3'-phosphate
  modified_base 5: mod_base = OTHER; note = 2'-O-methyladenosine-3'-phosphate
  modified_base 6: mod_base = OTHER; note = 2'-deoxy-2'-fluorouridine-3'-phosphate
  modified_base 7: mod_base = OTHER; note = 2'-O-methyladenosine-3'-phosphate
  modified_base 8: mod_base = OTHER; note = 2'-O-methyluridine-3'-phosphate
  modified_base 9: mod_base = OTHER; note = 2'-O-methylcytidine-3'-phosphate
  modified_base 10: mod_base = OTHER; note = 2'-O-methyluridine-3'-phosphate
  modified_base 11: mod_base = OTHER; note = 2'-O-methylcytidine-3'-phosphate
  modified_base 12: mod_base = OTHER; note = 2'-O-methyluridine-3'-phosphate
  modified_base 13: mod_base = OTHER; note = 2'-O-methylcytidine-3'-phosphate
  modified_base 14: mod_base = OTHER; note = 2'-deoxy-2'-fluorocytidine-3'-phosphate
  modified_base 15: mod_base = OTHER; note = 2'-O-methylcytidine-3'-phosphate
  modified_base 16: mod_base = OTHER; note = 2'-deoxy-2'-fluoroadenosine-3'-phosphate
  modified_base 17: mod_base = OTHER; note = 2'-O-methylguanosine-3'-phosphate
  modified_base 18: mod_base = OTHER; note = 2'-O-methylcytidine-3'-phosphate
  modified_base 19: mod_base = OTHER; note = 2'-O-methyladenosine-3'-phosphate
  modified_base 20: mod_base = OTHER; note = 2'-O-methylcytidine-3'-phosphate
  modified_base 21: mod_base = OTHER; note = 2'-O-methylcytidine-3'-phosphorothioate
  modified_base 22: mod_base = OTHER; note = 2'-O-methyluridine-3'-phosphorothioate
  modified_base 23: mod_base = OTHER; note = 2'-O-methyluridine
aggcatatctctcccagcacctt

SEQ ID NO: 954 - DNA, 23 bp, synthetic construct
  source 1..23: mol_type = other DNA
  modified_base 1: mod_base = OTHER; note = 2'-O-methyladenosine-3'-phosphorothioate
  modified_base 2: mod_base = OTHER; note = 2'-deoxy-2'-fluoroadenosine-3'-phosphorothioate
  modified_base 3: mod_base = OTHER; note = 2'-O-methylguanosine-3'-phosphate
  modified_base 4: mod_base = OTHER; note = 2'-O-methylguanosine-3'-phosphate
  modified_base 6: mod_base = OTHER; note = 2'-O-methyladenosine-3'-phosphate
  modified_base 7: mod_base = OTHER; note = Thymidine-glycol nucleic acid (GNA), S-Isomer
  modified_base 8: mod_base = OTHER; note = 2'-O-methyladenosine-3'-phosphate
  modified_base 9: mod_base = OTHER; note = 2'-O-methyluridine-3'-phosphate
  modified_base 10: mod_base = OTHER; note = 2'-O-methylcytidine-3'-phosphate
  modified_base 11: mod_base = OTHER; note = 2'-O-methyluridine-3'-phosphate
  modified_base 12: mod_base = OTHER; note = 2'-O-methylcytidine-3'-phosphate
  modified_base 13: mod_base = OTHER; note = 2'-O-methyluridine-3'-phosphate
  modified_base 14: mod_base = OTHER; note = 2'-deoxy-2'-fluorocytidine-3'-phosphate
  modified_base 15: mod_base = OTHER; note = 2'-O-methylcytidine-3'-phosphate
  modified_base 16: mod_base = OTHER; note = 2'-deoxy-2'-fluorocytidine-3'-phosphate
  modified_base 17: mod_base = OTHER; note = 2'-O-methyladenosine-3'-phosphate
  modified_base 18: mod_base = OTHER; note = 2'-O-methylguanosine-3'-phosphate
  modified_base 19: mod_base = OTHER; note = 2'-O-methylcytidine-3'-phosphate
  modified_base 20: mod_base = OTHER; note = 2'-O-methyladenosine-3'-phosphate
  modified_base 21: mod_base = OTHER; note = 2'-O-methylcytidine-3'-phosphorothioate
  modified_base 22: mod_base = OTHER; note = 2'-O-methylcytidine-3'-phosphorothioate
  modified_base 23: mod_base = OTHER; note = 2'-O-methyluridine
  misc_feature 1..4: note = RNA
  misc_feature 6..23: note = RNA
  misc_feature 5: note = DNA
aaggcatatctctcccagcacct

SEQ ID NO: 955 - DNA, 23 bp, synthetic construct
  source 1..23: mol_type = other DNA
  modified_base 1: mod_base = OTHER; note = 2'-O-methyladenosine-3'-phosphorothioate
  modified_base 2: mod_base = OTHER; note = 2'-deoxy-2'-fluoroadenosine-3'-phosphorothioate
  modified_base 3: mod_base = OTHER; note = 2'-O-methyladenosine-3'-phosphate
  modified_base 4: mod_base = OTHER; note = 2'-O-methylguanosine-3'-phosphate
  modified_base 6: mod_base = OTHER; note = 2'-O-methylcytidine-3'-phosphate
  modified_base 7: mod_base = OTHER; note = Adenosine-glycol nucleic acid (GNA), S-isomer
  modified_base 8: mod_base = OTHER; note = 2'-O-methyluridine-3'-phosphate
  modified_base 9: mod_base = OTHER; note = 2'-O-methyladenosine-3'-phosphate
  modified_base 10: mod_base = OTHER; note = 2'-O-methyluridine-3'-phosphate
  modified_base 11: mod_base = OTHER; note = 2'-O-methylcytidine-3'-phosphate
  modified_base 12: mod_base = OTHER; note = 2'-O-methyluridine-3'-phosphate
  modified_base 13: mod_base = OTHER; note = 2'-O-methylcytidine-3'-phosphate
  modified_base 14: mod_base = OTHER; note = 2'-deoxy-2'-fluorouridine-3'-phosphate
  modified_base 15: mod_base = OTHER; note = 2'-O-methylcytidine-3'-phosphate
  modified_base 16: mod_base = OTHER; note = 2'-deoxy-2'-fluorocytidine-3'-phosphate
  modified_base 17: mod_base = OTHER; note = 2'-O-methylcytidine-3'-phosphate
  modified_base 18: mod_base = OTHER; note = 2'-O-methyladenosine-3'-phosphate
  modified_base 19: mod_base = OTHER; note = 2'-O-methylguanosine-3'-phosphate
  modified_base 20: mod_base = OTHER; note = 2'-O-methylcytidine-3'-phosphate
  modified_base 21: mod_base = OTHER; note = 2'-O-methyladenosine-3'-phosphorothioate
  modified_base 22: mod_base = OTHER; note = 2'-O-methylcytidine-3'-phosphorothioate
  modified_base 23: mod_base = OTHER; note = 2'-O-methylcytidine
  misc_feature 1..4: note = RNA
  misc_feature 6..23: note = RNA
  misc_feature 5: note = DNA
aaaggcatatctctcccagcacc

SEQ ID NO: 956 - RNA, 23 nt, synthetic construct
  source 1..23: mol_type = other RNA
  modified_base 1: mod_base = OTHER; note = 2'-O-methyladenosine-3'-phosphorothioate
  modified_base 2: mod_base = OTHER; note = 2'-deoxy-2'-fluorouridine-3'-phosphorothioate
  modified_base 3: mod_base = OTHER; note = 2'-O-methylcytidine-3'-phosphate
  modified_base 4: mod_base = OTHER; note = 2'-O-methylguanosine-3'-phosphate
  modified_base 5: mod_base = OTHER; note = 2'-O-methyladenosine-3'-phosphate
  modified_base 6: mod_base = OTHER; note = 2'-deoxy-2'-fluoroadenosine-3'-phosphate
  modified_base 7: mod_base = OTHER; note = 2'-O-methylguanosine-3'-phosphate
  modified_base 8: mod_base = OTHER; note = 2'-O-methylguanosine-3'-phosphate
  modified_base 9: mod_base = OTHER; note = 2'-O-methylcytidine-3'-phosphate
  modified_base 10: mod_base = OTHER; note = 2'-O-methyladenosine-3'-phosphate
  modified_base 11: mod_base = OTHER; note = 2'-O-methyluridine-3'-phosphate
  modified_base 12: mod_base = OTHER; note = 2'-O-methyladenosine-3'-phosphate
  modified_base 13: mod_base = OTHER; note = 2'-O-methyluridine-3'-phosphate
  modified_base 14: mod_base = OTHER; note = 2'-deoxy-2'-fluorocytidine-3'-phosphate
  modified_base 15: mod_base = OTHER; note = 2'-O-methyluridine-3'-phosphate
  modified_base 16: mod_base = OTHER; note = 2'-deoxy-2'-fluorocytidine-3'-phosphate
  modified_base 17: mod_base = OTHER; note = 2'-O-methyluridine-3'-phosphate
  modified_base 18: mod_base = OTHER; note = 2'-O-methylcytidine-3'-phosphate
  modified_base 19: mod_base = OTHER; note = 2'-O-methylcytidine-3'-phosphate
  modified_base 20: mod_base = OTHER; note = 2'-O-methylcytidine-3'-phosphate
  modified_base 21: mod_base = OTHER; note = 2'-O-methyladenosine-3'-phosphorothioate
  modified_base 22: mod_base = OTHER; note = 2'-O-methylguanosine-3'-phosphorothioate
  modified_base 23: mod_base = OTHER; note = 2'-O-methylcytidine
atcgaaggcatatctctcccagc

SEQ ID NO: 957 - RNA, 23 nt, synthetic construct
  source 1..23: mol_type = other RNA
  modified_base 1: mod_base = OTHER; note = 2'-O-methyladenosine-3'-phosphorothioate
  modified_base 2: mod_base = OTHER; note = 2'-deoxy-2'-fluorocytidine-3'-phosphorothioate
  modified_base 3: mod_base = OTHER; note = 2'-O-methyluridine-3'-phosphate
  modified_base 4: mod_base = OTHER; note = 2'-O-methylcytidine-3'-phosphate
  modified_base 5: mod_base = OTHER; note = 2'-O-methylguanosine-3'-phosphate
  modified_base 6: mod_base = OTHER; note = 2'-deoxy-2'-fluoroadenosine-3'-phosphate
  modified_base 7: mod_base = OTHER; note = 2'-O-methyladenosine-3'-phosphate
  modified_base 8: mod_base = OTHER; note = 2'-O-methylguanosine-3'-phosphate
  modified_base 9: mod_base = OTHER; note = 2'-O-methylguanosine-3'-phosphate
  modified_base 10: mod_base = OTHER; note = 2'-O-methylcytidine-3'-phosphate
  modified_base 11: mod_base = OTHER; note = 2'-O-methyladenosine-3'-phosphate
  modified_base 12: mod_base = OTHER; note = 2'-O-methyluridine-3'-phosphate
  modified_base 13: mod_base = OTHER; note = 2'-O-methyladenosine-3'-phosphate
  modified_base 14: mod_base = OTHER; note = 2'-deoxy-2'-fluorouridine-3'-phosphate
  modified_base 15: mod_base = OTHER; note = 2'-O-methylcytidine-3'-phosphate
  modified_base 16: mod_base = OTHER; note = 2'-deoxy-2'-fluorouridine-3'-phosphate
  modified_base 17: mod_base = OTHER; note = 2'-O-methylcytidine-3'-phosphate
  modified_base 18: mod_base = OTHER; note = 2'-O-methyluridine-3'-phosphate
  modified_base 19: mod_base = OTHER; note = 2'-O-methylcytidine-3'-phosphate
  modified_base 20: mod_base = OTHER; note = 2'-O-methylcytidine-3'-phosphate
  modified_base 21: mod_base = OTHER; note = 2'-O-methylcytidine-3'-phosphorothioate
  modified_base 22: mod_base = OTHER; note = 2'-O-methyladenosine-3'-phosphorothioate
  modified_base 23: mod_base = OTHER; note = 2'-O-methylguanosine
actcgaaggcatatctctcccag

SEQ ID NO: 958 - RNA, 23 nt, synthetic construct
  source 1..23: mol_type = other RNA
  modified_base 1: mod_base = OTHER; note = 2'-O-methyladenosine-3'-phosphorothioate
  modified_base 2: mod_base = OTHER; note = 2'-deoxy-2'-fluorocytidine-3'-phosphorothioate
  modified_base 3: mod_base = OTHER; note = 2'-O-methylcytidine-3'-phosphate
  modified_base 4: mod_base = OTHER; note = 2'-O-methyluridine-3'-phosphate
  modified_base 5: mod_base = OTHER; note = 2'-O-methylcytidine-3'-phosphate
  modified_base 6: mod_base = OTHER; note = 2'-deoxy-2'-fluoroguanosine-3'-phosphate
  modified_base 7: mod_base = OTHER; note = 2'-O-methyladenosine-3'-phosphate
  modified_base 8: mod_base = OTHER; note = 2'-O-methyladenosine-3'-phosphate
  modified_base 9: mod_base = OTHER; note = 2'-O-methylguanosine-3'-phosphate
  modified_base 10: mod_base = OTHER; note = 2'-O-methylguanosine-3'-phosphate
  modified_base 11: mod_base = OTHER; note = 2'-O-methylcytidine-3'-phosphate
  modified_base 12: mod_base = OTHER; note = 2'-O-methyladenosine-3'-phosphate
  modified_base 13: mod_base = OTHER; note = 2'-O-methyluridine-3'-phosphate
  modified_base 14: mod_base = OTHER; note = 2'-deoxy-2'-fluoroadenosine-3'-phosphate
  modified_base 15: mod_base = OTHER; note = 2'-O-methyluridine-3'-phosphate
  modified_base 16: mod_base = OTHER; note = 2'-deoxy-2'-fluorocytidine-3'-phosphate
  modified_base 17: mod_base = OTHER; note = 2'-O-methyluridine-3'-phosphate
  modified_base 18: mod_base = OTHER; note = 2'-O-methylcytidine-3'-phosphate
  modified_base 19: mod_base = OTHER; note = 2'-O-methyluridine-3'-phosphate
  modified_base 20: mod_base = OTHER; note = 2'-O-methylcytidine-3'-phosphate
  modified_base 21: mod_base = OTHER; note = 2'-O-methylcytidine-3'-phosphorothioate
  modified_base 22: mod_base = OTHER; note = 2'-O-methylcytidine-3'-phosphorothioate
  modified_base 23: mod_base = OTHER; note = 2'-O-methyladenosine
acctcgaaggcatatctctccca

SEQ ID NO: 959 - RNA, 23 nt, synthetic construct
  source 1..23: mol_type = other RNA
  modified_base 1: mod_base = OTHER; note = 2'-O-methyladenosine-3'-phosphorothioate
  modified_base 2: mod_base = OTHER; note = 2'-deoxy-2'-fluorouridine-3'-phosphorothioate
  modified_base 3: mod_base = OTHER; note = 2'-O-methylcytidine-3'-phosphate
  modified_base 4: mod_base = OTHER; note = 2'-O-methylcytidine-3'-phosphate
  modified_base 5: mod_base = OTHER; note = 2'-O-methyluridine-3'-phosphate
  modified_base 6: mod_base = OTHER; note = 2'-deoxy-2'-fluorocytidine-3'-phosphate
  modified_base 7: mod_base = OTHER; note = 2'-O-methylguanosine-3'-phosphate
  modified_base 8: mod_base = OTHER; note = 2'-O-methyladenosine-3'-phosphate
  modified_base 9: mod_base = OTHER; note = 2'-O-methyladenosine-3'-phosphate
  modified_base 10: mod_base = OTHER; note = 2'-O-methylguanosine-3'-phosphate
  modified_base 11: mod_base = OTHER; note = 2'-O-methylguanosine-3'-phosphate
  modified_base 12: mod_base = OTHER; note = 2'-O-methylcytidine-3'-phosphate
  modified_base 13: mod_base = OTHER; note = 2'-O-methyladenosine-3'-phosphate
  modified_base 14: mod_base = OTHER; note = 2'-deoxy-2'-fluorouridine-3'-phosphate
  modified_base 15: mod_base = OTHER; note = 2'-O-methyladenosine-3'-phosphate
  modified_base 16: mod_base = OTHER; note = 2'-deoxy-2'-fluorouridine-3'-phosphate
  modified_base 17: mod_base = OTHER; note = 2'-O-methylcytidine-3'-phosphate
  modified_base 18: mod_base = OTHER; note = 2'-O-methyluridine-3'-phosphate
  modified_base 19: mod_base = OTHER; note = 2'-O-methylcytidine-3'-phosphate
  modified_base 20: mod_base = OTHER; note = 2'-O-methyluridine-3'-phosphate
  modified_base 21: mod_base = OTHER; note = 2'-O-methylcytidine-3'-phosphorothioate
  modified_base 22: mod_base = OTHER; note = 2'-O-methylcytidine-3'-phosphorothioate
  modified_base 23: mod_base = OTHER; note = 2'-O-methylcytidine
atcctcgaaggcatatctctccc

SEQ ID NO: 960 - DNA, 23 bp, synthetic construct
  source 1..23: mol_type = other DNA
  modified_base 1: mod_base = OTHER; note = 2'-O-methyladenosine-3'-phosphorothioate
  modified_base 2: mod_base = OTHER; note = 2'-deoxy-2'-fluorouridine-3'-phosphorothioate
  modified_base 3: mod_base = OTHER; note = 2'-O-methyladenosine-3'-phosphate
  modified_base 4: mod_base = OTHER; note = 2'-O-methyluridine-3'-phosphate
  modified_base 6: mod_base = OTHER; note = 2'-O-methylcytidine-3'-phosphate
  modified_base 7: mod_base = OTHER; note = Thymidine-glycol nucleic acid (GNA), S-Isomer
  modified_base 8: mod_base = OTHER; note = 2'-O-methylcytidine-3'-phosphate
  modified_base 9: mod_base = OTHER; note = 2'-O-methylguanosine-3'-phosphate
  modified_base 10: mod_base = OTHER; note = 2'-O-methyladenosine-3'-phosphate
  modified_base 11: mod_base = OTHER; note = 2'-O-methyladenosine-3'-phosphate
  modified_base 12: mod_base = OTHER; note = 2'-O-methylguanosine-3'-phosphate
  modified_base 13: mod_base = OTHER; note = 2'-O-methylguanosine-3'-phosphate
  modified_base 14: mod_base = OTHER; note = 2'-deoxy-2'-fluorocytidine-3'-phosphate
  modified_base 15: mod_base = OTHER; note = 2'-O-methyladenosine-3'-phosphate
  modified_base 16: mod_base = OTHER; note = 2'-deoxy-2'-fluorouridine-3'-phosphate
  modified_base 17: mod_base = OTHER; note = 2'-O-methyladenosine-3'-phosphate
  modified_base 18: mod_base = OTHER; note = 2'-O-methyluridine-3'-phosphate
  modified_base 19: mod_base = OTHER; note = 2'-O-methylcytidine-3'-phosphate
  modified_base 20: mod_base = OTHER; note = 2'-O-methyluridine-3'-phosphate
  modified_base 21: mod_base = OTHER; note = 2'-O-methylcytidine-3'-phosphorothioate
  modified_base 22: mod_base = OTHER; note = 2'-O-methyluridine-3'-phosphorothioate
  modified_base 23: mod_base = OTHER; note = 2'-O-methylcytidine
  misc_feature 1..4: note = RNA
  misc_feature 6..23: note = RNA
  misc_feature 5: note = DNA
atatcctcgaaggcatatctctc

SEQ ID NO: 961 - RNA, 23 nt, synthetic construct
  source 1..23: mol_type = other RNA
  modified_base 1: mod_base = OTHER; note = 2'-O-methyladenosine-3'-phosphorothioate
  modified_base 2: mod_base = OTHER; note = 2'-deoxy-2'-fluoroadenosine-3'-phosphorothioate
  modified_base 3: mod_base = OTHER; note = 2'-O-methyladenosine-3'-phosphate
  modified_base 4: mod_base = OTHER; note = 2'-O-methyluridine-3'-phosphate
  modified_base 5: mod_base = OTHER; note = 2'-O-methyladenosine-3'-phosphate
  modified_base 6: mod_base = OTHER; note = 2'-deoxy-2'-fluorouridine-3'-phosphate
  modified_base 7: mod_base = OTHER; note = 2'-O-methylcytidine-3'-phosphate
  modified_base 8: mod_base = OTHER; note = 2'-O-methylcytidine-3'-phosphate
  modified_base 9: mod_base = OTHER; note = 2'-O-methyluridine-3'-phosphate
  modified_base 10: mod_base = OTHER; note = 2'-O-methylcytidine-3'-phosphate
  modified_base 11: mod_base = OTHER; note = 2'-O-methylguanosine-3'-phosphate
  modified_base 12: mod_base = OTHER; note = 2'-O-methyladenosine-3'-phosphate
  modified_base 13: mod_base = OTHER; note = 2'-O-methyladenosine-3'-phosphate
  modified_base 14: mod_base = OTHER; note = 2'-deoxy-2'-fluoroguanosine-3'-phosphate
  modified_base 15: mod_base = OTHER; note = 2'-O-methylguanosine-3'-phosphate
  modified_base 16: mod_base = OTHER; note = 2'-deoxy-2'-fluorocytidine-3'-phosphate
  modified_base 17: mod_base = OTHER; note = 2'-O-methyladenosine-3'-phosphate
  modified_base 18: mod_base = OTHER; note = 2'-O-methyluridine-3'-phosphate
  modified_base 19: mod_base = OTHER; note = 2'-O-methyladenosine-3'-phosphate
  modified_base 20: mod_base = OTHER; note = 2'-O-methyluridine-3'-phosphate
  modified_base 21: mod_base = OTHER; note = 2'-O-methylcytidine-3'-phosphorothioate
  modified_base 22: mod_base = OTHER; note = 2'-O-methyluridine-3'-phosphorothioate
  modified_base 23: mod_base = OTHER; note = 2'-O-methylcytidine
aaatatcctcgaaggcatatctc

SEQ ID NO: 962 - RNA, 23 nt, synthetic construct
  source 1..23: mol_type = other RNA
  modified_base 1: mod_base = OTHER; note = 2'-O-methyladenosine-3'-phosphorothioate
  modified_base 2: mod_base = OTHER; note = 2'-deoxy-2'-fluoroadenosine-3'-phosphorothioate
  modified_base 3: mod_base = OTHER; note = 2'-O-methyladenosine-3'-phosphate
  modified_base 4: mod_base = OTHER; note = 2'-O-methyladenosine-3'-phosphate
  modified_base 5: mod_base = OTHER; note = 2'-O-methyluridine-3'-phosphate
  modified_base 6: mod_base = OTHER; note = 2'-deoxy-2'-fluoroadenosine-3'-phosphate
  modified_base 7: mod_base = OTHER; note = 2'-O-methyluridine-3'-phosphate
  modified_base 8: mod_base = OTHER; note = 2'-O-methylcytidine-3'-phosphate
  modified_base 9: mod_base = OTHER; note = 2'-O-methylcytidine-3'-phosphate
  modified_base 10: mod_base = OTHER; note = 2'-O-methyluridine-3'-phosphate
  modified_base 11: mod_base = OTHER; note = 2'-O-methylcytidine-3'-phosphate
  modified_base 12: mod_base = OTHER; note = 2'-O-methylguanosine-3'-phosphate
  modified_base 13: mod_base = OTHER; note = 2'-O-methyladenosine-3'-phosphate
  modified_base 14: mod_base = OTHER; note = 2'-deoxy-2'-fluoroadenosine-3'-phosphate
  modified_base 15: mod_base = OTHER; note = 2'-O-methylguanosine-3'-phosphate
  modified_base 16: mod_base = OTHER; note = 2'-deoxy-2'-fluoroguanosine-3'-phosphate
  modified_base 17: mod_base = OTHER; note = 2'-O-methylcytidine-3'-phosphate
  modified_base 18: mod_base = OTHER; note = 2'-O-methyladenosine-3'-phosphate
  modified_base 19: mod_base = OTHER; note = 2'-O-methyluridine-3'-phosphate
  modified_base 20: mod_base = OTHER; note = 2'-O-methyladenosine-3'-phosphate
  modified_base 21: mod_base = OTHER; note = 2'-O-methyluridine-3'-phosphorothioate
  modified_base 22: mod_base = OTHER; note = 2'-O-methylcytidine-3'-phosphorothioate
  modified_base 23: mod_base = OTHER; note = 2'-O-methyluridine
aaaatatcctcgaaggcatatct

SEQ ID NO: 963 - RNA, 23 nt, synthetic construct
  source 1..23: mol_type = other RNA
  modified_base 1: mod_base = OTHER; note = 2'-O-methyladenosine-3'-phosphorothioate
  modified_base 2: mod_base = OTHER; note = 2'-deoxy-2'-fluorocytidine-3'-phosphorothioate
  modified_base 3: mod_base = OTHER; note = 2'-O-methyladenosine-3'-phosphate
  modified_base 4: mod_base = OTHER; note = 2'-O-methyladenosine-3'-phosphate
  modified_base 5: mod_base = OTHER; note = 2'-O-methyladenosine-3'-phosphate
  modified_base 6: mod_base = OTHER; note = 2'-deoxy-2'-fluorouridine-3'-phosphate
  modified_base 7: mod_base = OTHER; note = 2'-O-methyladenosine-3'-phosphate
  modified_base 8: mod_base = OTHER; note = 2'-O-methyluridine-3'-phosphate
  modified_base 9: mod_base = OTHER; note = 2'-O-methylcytidine-3'-phosphate
  modified_base 10: mod_base = OTHER; note = 2'-O-methylcytidine-3'-phosphate
  modified_base 11: mod_base = OTHER; note = 2'-O-methyluridine-3'-phosphate
  modified_base 12: mod_base = OTHER; note = 2'-O-methylcytidine-3'-phosphate
  modified_base 13: mod_base = OTHER; note = 2'-O-methylguanosine-3'-phosphate
  modified_base 14: mod_base = OTHER; note = 2'-deoxy-2'-fluoroadenosine-3'-phosphate
  modified_base 15: mod_base = OTHER; note = 2'-O-methyladenosine-3'-phosphate
  modified_base 16: mod_base = OTHER; note = 2'-deoxy-2'-fluoroguanosine-3'-phosphate
  modified_base 17: mod_base = OTHER; note = 2'-O-methylguanosine-3'-phosphate
  modified_base 18: mod_base = OTHER; note = 2'-O-methylcytidine-3'-phosphate
  modified_base 19: mod_base = OTHER; note = 2'-O-methyladenosine-3'-phosphate
  modified_base 20: mod_base = OTHER; note = 2'-O-methyluridine-3'-phosphate
  modified_base 21: mod_base = OTHER; note = 2'-O-methyladenosine-3'-phosphorothioate
  modified_base 22: mod_base = OTHER; note = 2'-O-methyluridine-3'-phosphorothioate
  modified_base 23: mod_base = OTHER; note = 2'-O-methylcytidine
acaaatatcctcgaaggcatatc

SEQ ID NO: 964 - RNA, 23 nt, synthetic construct
  source 1..23: mol_type = other RNA
  modified_base 1: mod_base = OTHER; note = 2'-O-methyladenosine-3'-phosphorothioate
  modified_base 2: mod_base = OTHER; note = 2'-deoxy-2'-fluorocytidine-3'-phosphorothioate
  modified_base 3: mod_base = OTHER; note = 2'-O-methylcytidine-3'-phosphate
  modified_base 4: mod_base = OTHER; note = 2'-O-methyladenosine-3'-phosphate
  modified_base 5: mod_base = OTHER; note = 2'-O-methyladenosine-3'-phosphate
  modified_base 6: mod_base = OTHER; note = 2'-deoxy-2'-fluoroadenosine-3'-phosphate
  modified_base 7: mod_base = OTHER; note = 2'-O-methyluridine-3'-phosphate
  modified_base 8: mod_base = OTHER; note = 2'-O-methyladenosine-3'-phosphate
  modified_base 9: mod_base = OTHER; note = 2'-O-methyluridine-3'-phosphate
  modified_base 10: mod_base = OTHER; note = 2'-O-methylcytidine-3'-phosphate
  modified_base 11: mod_base = OTHER; note = 2'-O-methylcytidine-3'-phosphate
  modified_base 12: mod_base = OTHER; note = 2'-O-methyluridine-3'-phosphate
  modified_base 13: mod_base = OTHER; note = 2'-O-methylcytidine-3'-phosphate
  modified_base 14: mod_base = OTHER; note = 2'-deoxy-2'-fluoroguanosine-3'-phosphate
  modified_base 15: mod_base = OTHER; note = 2'-O-methyladenosine-3'-phosphate
  modified_base 16: mod_base = OTHER; note = 2'-deoxy-2'-fluoroadenosine-3'-phosphate
  modified_base 17: mod_base = OTHER; note = 2'-O-methylguanosine-3'-phosphate
  modified_base 18: mod_base = OTHER; note = 2'-O-methylguanosine-3'-phosphate
  modified_base 19: mod_base = OTHER; note = 2'-O-methylcytidine-3'-phosphate
  modified_base 20: mod_base = OTHER; note = 2'-O-methyladenosine-3'-phosphate
  modified_base 21: mod_base = OTHER; note = 2'-O-methyluridine-3'-phosphorothioate
  modified_base 22: mod_base = OTHER; note = 2'-O-methyladenosine-3'-phosphorothioate
  modified_base 23: mod_base = OTHER; note = 2'-O-methyluridine
accaaatatcctcgaaggcatat

SEQ ID NO: 965 - RNA, 23 nt, synthetic construct
  source 1..23: mol_type = other RNA
  modified_base 1: mod_base = OTHER; note = 2'-O-methyladenosine-3'-phosphorothioate
  modified_base 2: mod_base = OTHER; note = 2'-deoxy-2'-fluorouridine-3'-phosphorothioate
  modified_base 3: mod_base = OTHER; note = 2'-O-methylcytidine-3'-phosphate
  modified_base 4: mod_base = OTHER; note = 2'-O-methylcytidine-3'-phosphate
  modified_base 5: mod_base = OTHER; note = 2'-O-methyladenosine-3'-phosphate
  modified_base 6: mod_base = OTHER; note = 2'-deoxy-2'-fluoroadenosine-3'-phosphate
  modified_base 7: mod_base = OTHER; note = 2'-O-methyladenosine-3'-phosphate
  modified_base 8: mod_base = OTHER; note = 2'-O-methyluridine-3'-phosphate
  modified_base 9: mod_base = OTHER; note = 2'-O-methyladenosine-3'-phosphate
  modified_base 10: mod_base = OTHER; note = 2'-O-methyluridine-3'-phosphate
  modified_base 11: mod_base = OTHER; note = 2'-O-methylcytidine-3'-phosphate
  modified_base 12: mod_base = OTHER; note = 2'-O-methylcytidine-3'-phosphate
  modified_base 13: mod_base = OTHER; note = 2'-O-methyluridine-3'-phosphate
  modified_base 14: mod_base = OTHER; note = 2'-deoxy-2'-fluorocytidine-3'-phosphate
  modified_base 15: mod_base = OTHER; note = 2'-O-methylguanosine-3'-phosphate
  modified_base 16: mod_base = OTHER; note = 2'-deoxy-2'-fluoroadenosine-3'-phosphate
  modified_base 17: mod_base = OTHER; note = 2'-O-methyladenosine-3'-phosphate
  modified_base 18: mod_base = OTHER; note = 2'-O-methylguanosine-3'-phosphate
  modified_base 19: mod_base = OTHER; note = 2'-O-methylguanosine-3'-phosphate
  modified_base 20: mod_base = OTHER; note = 2'-O-methylcytidine-3'-phosphate
  modified_base 21: mod_base = OTHER; note = 2'-O-methyladenosine-3'-phosphorothioate
  modified_base 22: mod_base = OTHER; note = 2'-O-methyluridine-3'-phosphorothioate
  modified_base 23: mod_base = OTHER; note = 2'-O-methyladenosine
atccaaatatcctcgaaggcata

SEQ ID NO: 966 - RNA, 23 nt, synthetic construct
  source 1..23: mol_type = other RNA
  modified_base 1: mod_base = OTHER; note = 2'-O-methyladenosine-3'-phosphorothioate
  modified_base 2: mod_base = OTHER; note = 2'-deoxy-2'-fluorocytidine-3'-phosphorothioate
  modified_base 3: mod_base = OTHER; note = 2'-O-methyluridine-3'-phosphate
  modified_base 4: mod_base = OTHER; note = 2'-O-methylcytidine-3'-phosphate
  modified_base 5: mod_base = OTHER; note = 2'-O-methyluridine-3'-phosphate
  modified_base 6: mod_base = OTHER; note = 2'-deoxy-2'-fluorouridine-3'-phosphate
  modified_base 7: mod_base = OTHER; note = 2'-O-methylcytidine-3'-phosphate
  modified_base 8: mod_base = OTHER; note = 2'-O-methylcytidine-3'-phosphate
  modified_base 9: mod_base = OTHER; note = 2'-O-methyladenosine-3'-phosphate
  modified_base 10: mod_base = OTHER; note = 2'-O-methyladenosine-3'-phosphate
  modified_base 11: mod_base = OTHER; note = 2'-O-methylguanosine-3'-phosphate
  modified_base 12: mod_base = OTHER; note = 2'-O-methyladenosine-3'-phosphate
  modified_base 13: mod_base = OTHER; note = 2'-O-methyladenosine-3'-phosphate
  modified_base 14: mod_base = OTHER; note = 2'-deoxy-2'-fluorocytidine-3'-phosphate
  modified_base 15: mod_base = OTHER; note = 2'-O-methylcytidine-3'-phosphate
  modified_base 16: mod_base = OTHER; note = 2'-deoxy-2'-fluorouridine-3'-phosphate
  modified_base 17: mod_base = OTHER; note = 2'-O-methylguanosine-3'-phosphate
  modified_base 18: mod_base = OTHER; note = 2'-O-methyladenosine-3'-phosphate
  modified_base 19: mod_base = OTHER; note = 2'-O-methyladenosine-3'-phosphate
  modified_base 20: mod_base = OTHER; note = 2'-O-methyluridine-3'-phosphate
  modified_base 21: mod_base = OTHER; note = 2'-O-methylguanosine-3'-phosphorothioate
  modified_base 22: mod_base = OTHER; note = 2'-O-methylcytidine-3'-phosphorothioate
  modified_base 23: mod_base = OTHER; note = 2'-O-methyladenosine
actcttccaagaacctgaatgca

SEQ ID NO: 967 - RNA, 23 nt, synthetic construct
  source 1..23: mol_type = other RNA
  modified_base 1: mod_base = OTHER; note = 2'-O-methyladenosine-3'-phosphorothioate
  modified_base 2: mod_base = OTHER; note = 2'-deoxy-2'-fluorocytidine-3'-phosphorothioate
  modified_base 3: mod_base = OTHER; note = 2'-O-methylcytidine-3'-phosphate
  modified_base 4: mod_base = OTHER; note = 2'-O-methylcytidine-3'-phosphate
  modified_base 5: mod_base = OTHER; note = 2'-O-methyluridine-3'-phosphate
  modified_base 6: mod_base = OTHER; note = 2'-deoxy-2'-fluorouridine-3'-phosphate
  modified_base 7: mod_base = OTHER; note = 2'-O-methylcytidine-3'-phosphate
  modified_base 8: mod_base = OTHER; note = 2'-O-methyluridine-3'-phosphate
  modified_base 9: mod_base = OTHER; note = 2'-O-methylcytidine-3'-phosphate
  modified_base 10: mod_base = OTHER; note = 2'-O-methyluridine-3'-phosphate
  modified_base 11: mod_base = OTHER; note = 2'-O-methyluridine-3'-phosphate
  modified_base 12: mod_base = OTHER; note = 2'-O-methylcytidine-3'-phosphate
  modified_base 13: mod_base = OTHER; note = 2'-O-methylcytidine-3'-phosphate
  modified_base 14: mod_base = OTHER; note = 2'-deoxy-2'-fluoroadenosine-3'-phosphate
  modified_base 15: mod_base = OTHER; note = 2'-O-methyladenosine-3'-phosphate
  modified_base 16: mod_base = OTHER; note = 2'-deoxy-2'-fluoroguanosine-3'-phosphate
  modified_base 17: mod_base = OTHER; note = 2'-O-methyladenosine-3'-phosphate
  modified_base 18: mod_base = OTHER; note = 2'-O-methyladenosine-3'-phosphate
  modified_base 19: mod_base = OTHER; note = 2'-O-methylcytidine-3'-phosphate
  modified_base 20: mod_base = OTHER; note = 2'-O-methylcytidine-3'-phosphate
  modified_base 21: mod_base = OTHER; note = 2'-O-methyluridine-3'-phosphorothioate
  modified_base 22: mod_base = OTHER; note = 2'-O-methylguanosine-3'-phosphorothioate
  modified_base 23: mod_base = OTHER; note = 2'-O-methyladenosine
acccttctcttccaagaacctga

SEQ ID NO: 968 - RNA, 23 nt, synthetic construct
  source 1..23: mol_type = other RNA
  modified_base 1: mod_base = OTHER; note = 2'-O-methyladenosine-3'-phosphorothioate
  modified_base 2: mod_base = OTHER; note = 2'-deoxy-2'-fluoroguanosine-3'-phosphorothioate
  modified_base 3: mod_base = OTHER; note = 2'-O-methylcytidine-3'-phosphate
  modified_base 4: mod_base = OTHER; note = 2'-O-methylcytidine-3'-phosphate
  modified_base 5: mod_base = OTHER; note = 2'-O-methylcytidine-3'-phosphate
  modified_base 6: mod_base = OTHER; note = 2'-deoxy-2'-fluorouridine-3'-phosphate
  modified_base 7: mod_base = OTHER; note = 2'-O-methyluridine-3'-phosphate
  modified_base 8: mod_base = OTHER; note = 2'-O-methylcytidine-3'-phosphate
  modified_base 9: mod_base = OTHER; note = 2'-O-methyluridine-3'-phosphate
  modified_base 10: mod_base = OTHER; note = 2'-O-methylcytidine-3'-phosphate
  modified_base 11: mod_base = OTHER; note = 2'-O-methyluridine-3'-phosphate
  modified_base 12: mod_base = OTHER; note = 2'-O-methyluridine-3'-phosphate
  modified_base 13: mod_base = OTHER; note = 2'-O-methylcytidine-3'-phosphate
  modified_base 14: mod_base = OTHER; note = 2'-deoxy-2'-fluorocytidine-3'-phosphate
  modified_base 15: mod_base = OTHER; note = 2'-O-methyladenosine-3'-phosphate
  modified_base 16: mod_base = OTHER; note = 2'-deoxy-2'-fluoroadenosine-3'-phosphate
  modified_base 17: mod_base = OTHER; note = 2'-O-methylguanosine-3'-phosphate
  modified_base 18: mod_base = OTHER; note = 2'-O-methyladenosine-3'-phosphate
  modified_base 19: mod_base = OTHER; note = 2'-O-methyladenosine-3'-phosphate
  modified_base 20: mod_base = OTHER; note = 2'-O-methylcytidine-3'-phosphate
  modified_base 21: mod_base = OTHER; note = 2'-O-methylcytidine-3'-phosphorothioate
  modified_base 22: mod_base = OTHER; note = 2'-O-methyluridine-3'-phosphorothioate
  modified_base 23: mod_base = OTHER; note = 2'-O-methylguanosine
agcccttctcttccaagaacctg

SEQ ID NO: 969 - DNA, 23 bp, synthetic construct
  source 1..23: mol_type = other DNA
  modified_base 1: mod_base = OTHER; note = 2'-O-methyladenosine-3'-phosphorothioate
  modified_base 2: mod_base = OTHER; note = 2'-deoxy-2'-fluoroguanosine-3'-phosphorothioate
  modified_base 3: mod_base = OTHER; note = 2'-O-methylcytidine-3'-phosphate
  modified_base 4: mod_base = OTHER; note = 2'-O-methylcytidine-3'-phosphate
  modified_base 6: mod_base = OTHER; note = 2'-O-methyluridine-3'-phosphate
  modified_base 7: mod_base = OTHER; note = Thymidine-glycol nucleic acid (GNA), S-Isomer
  modified_base 8: mod_base = OTHER; note = 2'-O-methylcytidine-3'-phosphate
  modified_base 9: mod_base = OTHER; note = 2'-O-methyluridine-3'-phosphate
  modified_base 10: mod_base = OTHER; note = 2'-O-methylcytidine-3'-phosphate
  modified_base 11: mod_base = OTHER; note = 2'-O-methyluridine-3'-phosphate
  modified_base 12: mod_base = OTHER; note = 2'-O-methyluridine-3'-phosphate
  modified_base 13: mod_base = OTHER; note = 2'-O-methylcytidine-3'-phosphate
  modified_base 14: mod_base = OTHER; note = 2'-deoxy-2'-fluorocytidine-3'-phosphate
  modified_base 15: mod_base = OTHER; note = 2'-O-methyladenosine-3'-phosphate
  modified_base 16: mod_base = OTHER; note = 2'-deoxy-2'-fluoroadenosine-3'-phosphate
  modified_base 17: mod_base = OTHER; note = 2'-O-methylguanosine-3'-phosphate
  modified_base 18: mod_base = OTHER; note = 2'-O-methyladenosine-3'-phosphate
  modified_base 19: mod_base = OTHER; note = 2'-O-methyladenosine-3'-phosphate
  modified_base 20: mod_base = OTHER; note = 2'-O-methylcytidine-3'-phosphate
  modified_base 21: mod_base = OTHER; note = 2'-O-methylcytidine-3'-phosphorothioate
  modified_base 22: mod_base = OTHER; note = 2'-O-methyluridine-3'-phosphorothioate
  modified_base 23: mod_base = OTHER; note = 2'-O-methylguanosine
  misc_feature 1..4: note = RNA
  misc_feature 6..23: note = RNA
  misc_feature 5: note = DNA
agcccttctcttccaagaacctg

SEQ ID NO: 970 - DNA, 23 bp, synthetic construct
  source 1..23: mol_type = other DNA
  modified_base 1: mod_base = OTHER; note = 2'-O-methyladenosine-3'-phosphorothioate
  modified_base 2: mod_base = OTHER; note = 2'-deoxy-2'-fluorouridine-3'-phosphorothioate
  modified_base 3: mod_base = OTHER; note = 2'-O-methylguanosine-3'-phosphate
  modified_base 4: mod_base = OTHER; note = 2'-O-methylcytidine-3'-phosphate
  modified_base 6: mod_base = OTHER; note = 2'-O-methylcytidine-3'-phosphate
  modified_base 7: mod_base = OTHER; note = Thymidine-glycol nucleic acid (GNA), S-Isomer
  modified_base 8: mod_base = OTHER; note = 2'-O-methyluridine-3'-phosphate
  modified_base 9: mod_base = OTHER; note = 2'-O-methylcytidine-3'-phosphate
  modified_base 10: mod_base = OTHER; note = 2'-O-methyluridine-3'-phosphate
  modified_base 11: mod_base = OTHER; note = 2'-O-methylcytidine-3'-phosphate
  modified_base 12: mod_base = OTHER; note = 2'-O-methyluridine-3'-phosphate
  modified_base 13: mod_base = OTHER; note = 2'-O-methyluridine-3'-phosphate
  modified_base 14: mod_base = OTHER; note = 2'-deoxy-2'-fluorocytidine-3'-phosphate
  modified_base 15: mod_base = OTHER; note = 2'-O-methylcytidine-3'-phosphate
  modified_base 16: mod_base = OTHER; note = 2'-deoxy-2'-fluoroadenosine-3'-phosphate
  modified_base 17: mod_base = OTHER; note = 2'-O-methyladenosine-3'-phosphate
  modified_base 18: mod_base = OTHER; note = 2'-O-methylguanosine-3'-phosphate
  modified_base 19: mod_base = OTHER; note = 2'-O-methyladenosine-3'-phosphate
  modified_base 20: mod_base = OTHER; note = 2'-O-methyladenosine-3'-phosphate
  modified_base 21: mod_base = OTHER; note = 2'-O-methylcytidine-3'-phosphorothioate
  modified_base 22: mod_base = OTHER; note = 2'-O-methylcytidine-3'-phosphorothioate
  modified_base 23: mod_base = OTHER; note = 2'-O-methyluridine
  misc_feature 1..4: note = RNA
  misc_feature 6..23: note = RNA
  misc_feature 5: note = DNA
atgcccttctcttccaagaacct

SEQ ID NO: 971 - DNA, 23 bp, synthetic construct
  source 1..23: mol_type = other DNA
  modified_base 1: mod_base = OTHER; note = 2'-O-methyladenosine-3'-phosphorothioate
  modified_base 2: mod_base = OTHER; note = 2'-deoxy-2'-fluoroguanosine-3'-phosphorothioate
  modified_base 3: mod_base = OTHER; note = 2'-O-methyluridine-3'-phosphate
  modified_base 4: mod_base = OTHER; note = 2'-O-methyluridine-3'-phosphate
  modified_base 6: mod_base = OTHER; note = 2'-O-methylcytidine-3'-phosphate
  modified_base 7: mod_base = OTHER; note = Adenosine-glycol nucleic acid (GNA), S-isomer
  modified_base 8: mod_base = OTHER; note = 2'-O-methylguanosine-3'-phosphate
  modified_base 9: mod_base = OTHER; note = 2'-O-methyladenosine-3'-phosphate
  modified_base 10: mod_base = OTHER; note = 2'-O-methyluridine-3'-phosphate
  modified_base 11: mod_base = OTHER; note = 2'-O-methylguanosine-3'-phosphate
  modified_base 12: mod_base = OTHER; note = 2'-O-methylcytidine-3'-phosphate
  modified_base 13: mod_base = OTHER; note = 2'-O-methylcytidine-3'-phosphate
  modified_base 14: mod_base = OTHER; note = 2'-deoxy-2'-fluorocytidine-3'-phosphate
  modified_base 15: mod_base = OTHER; note = 2'-O-methyluridine-3'-phosphate
  modified_base 16: mod_base = OTHER; note = 2'-deoxy-2'-fluorouridine-3'-phosphate
  modified_base 17: mod_base = OTHER; note = 2'-O-methylcytidine-3'-phosphate
  modified_base 18: mod_base = OTHER; note = 2'-O-methyluridine-3'-phosphate
  modified_base 19: mod_base = OTHER; note = 2'-O-methylcytidine-3'-phosphate
  modified_base 20: mod_base = OTHER; note = 2'-O-methyluridine-3'-phosphate
  modified_base 21: mod_base = OTHER; note = 2'-O-methyluridine-3'-phosphorothioate
  modified_base 22: mod_base = OTHER; note = 2'-O-methylcytidine-3'-phosphorothioate
  modified_base 23: mod_base = OTHER; note = 2'-O-methylcytidine
  misc_feature 1..4: note = RNA
  misc_feature 6..23: note = RNA
  misc_feature 5: note = DNA
agttgcagatgcccttctcttcc

SEQ ID NO: 972 - DNA, 23 bp, synthetic construct
  source 1..23: mol_type = other DNA
  modified_base 1: mod_base = OTHER; note = 2'-O-methyladenosine-3'-phosphorothioate
  modified_base 2: mod_base = OTHER; note = 2'-deoxy-2'-fluorouridine-3'-phosphorothioate
  modified_base 3: mod_base = OTHER; note = 2'-O-methyluridine-3'-phosphate
  modified_base 4: mod_base = OTHER; note = 2'-O-methylcytidine-3'-phosphate
  modified_base 6: mod_base = OTHER; note = 2'-O-methylguanosine-3'-phosphate
  modified_base 7: mod_base = OTHER; note = Adenosine-glycol nucleic acid (GNA), S-isomer
  modified_base 8: mod_base = OTHER; note = 2'-O-methylguanosine-3'-phosphate
  modified_base 9: mod_base = OTHER; note = 2'-O-methylguanosine-3'-phosphate
  modified_base 10: mod_base = OTHER; note = 2'-O-methyladenosine-3'-phosphate
  modified_base 11: mod_base = OTHER; note = 2'-O-methyluridine-3'-phosphate
  modified_base 12: mod_base = OTHER; note = 2'-O-methylguanosine-3'-phosphate
  modified_base 13: mod_base = OTHER; note = 2'-O-methyladenosine-3'-phosphate
  modified_base 14: mod_base = OTHER; note = 2'-deoxy-2'-fluorocytidine-3'-phosphate
  modified_base 15: mod_base = OTHER; note = 2'-O-methyluridine-3'-phosphate
  modified_base 16: mod_base = OTHER; note = 2'-deoxy-2'-fluorouridine-3'-phosphate
  modified_base 17: mod_base = OTHER; note = 2'-O-methylcytidine-3'-phosphate
  modified_base 18: mod_base = OTHER; note = 2'-O-methyladenosine-3'-phosphate
  modified_base 19: mod_base = OTHER; note = 2'-O-methylguanosine-3'-phosphate
  modified_base 20: mod_base = OTHER; note = 2'-O-methylguanosine-3'-phosphate
  modified_base 21: mod_base = OTHER; note = 2'-O-methylcytidine-3'-phosphorothioate
  modified_base 22: mod_base = OTHER; note = 2'-O-methylcytidine-3'-phosphorothioate
  modified_base 23: mod_base = OTHER; note = 2'-O-methyluridine
  misc_feature 1..4: note = RNA
  misc_feature 6..23: note = RNA
  misc_feature 5: note = DNA
attctgaggatgacttcaggcct

SEQ ID NO: 973 - RNA, 23 nt, synthetic construct
  source 1..23: mol_type = other RNA
  modified_base 1: mod_base = OTHER; note = 2'-O-methyladenosine-3'-phosphorothioate
  modified_base 2: mod_base = OTHER; note = 2'-deoxy-2'-fluorocytidine-3'-phosphorothioate
  modified_base 3: mod_base = OTHER; note = 2'-O-methylcytidine-3'-phosphate
  modified_base 4: mod_base = OTHER; note = 2'-O-methyluridine-3'-phosphate
  modified_base 5: mod_base = OTHER; note = 2'-O-methyluridine-3'-phosphate
  modified_base 6: mod_base = OTHER; note = 2'-deoxy-2'-fluorocytidine-3'-phosphate
  modified_base 7: mod_base = OTHER; note = 2'-O-methyluridine-3'-phosphate
  modified_base 8: mod_base = OTHER; note = 2'-O-methylguanosine-3'-phosphate
  modified_base 9: mod_base = OTHER; note = 2'-O-methyladenosine-3'-phosphate
  modified_base 10: mod_base = OTHER; note = 2'-O-methylguanosine-3'-phosphate
  modified_base 11: mod_base = OTHER; note = 2'-O-methylguanosine-3'-phosphate
  modified_base 12: mod_base = OTHER; note = 2'-O-methyladenosine-3'-phosphate
  modified_base 13: mod_base = OTHER; note = 2'-O-methyluridine-3'-phosphate
  modified_base 14: mod_base = OTHER; note = 2'-deoxy-2'-fluoroguanosine-3'-phosphate
  modified_base 15: mod_base = OTHER; note = 2'-O-methyladenosine-3'-phosphate
  modified_base 16: mod_base = OTHER; note = 2'-deoxy-2'-fluorocytidine-3'-phosphate
  modified_base 17: mod_base = OTHER; note = 2'-O-methyluridine-3'-phosphate
  modified_base 18: mod_base = OTHER; note = 2'-O-methyluridine-3'-phosphate
  modified_base 19: mod_base = OTHER; note = 2'-O-methylcytidine-3'-phosphate
  modified_base 20: mod_base = OTHER; note = 2'-O-methyladenosine-3'-phosphate
  modified_base 21: mod_base = OTHER; note = 2'-O-methylguanosine-3'-phosphorothioate
  modified_base 22: mod_base = OTHER; note = 2'-O-methylguanosine-3'-phosphorothioate
  modified_base 23: mod_base = OTHER; note = 2'-O-methylcytidine
accttctgaggatgacttcaggc

SEQ ID NO: 974 - RNA, 23 nt, synthetic construct
  source 1..23: mol_type = other RNA
  modified_base 1: mod_base = OTHER; note = 2'-O-methyladenosine-3'-phosphorothioate
  modified_base 2: mod_base = OTHER; note = 2'-deoxy-2'-fluorocytidine-3'-phosphorothioate
  modified_base 3: mod_base = OTHER; note = 2'-O-methylcytidine-3'-phosphate
  modified_base 4: mod_base = OTHER; note = 2'-O-methylcytidine-3'-phosphate
  modified_base 5: mod_base = OTHER; note = 2'-O-methyluridine-3'-phosphate
  modified_base 6: mod_base = OTHER; note = 2'-deoxy-2'-fluorouridine-3'-phosphate
  modified_base 7: mod_base = OTHER; note = 2'-O-methylcytidine-3'-phosphate
  modified_base 8: mod_base = OTHER; note = 2'-O-methyluridine-3'-phosphate
  modified_base 9: mod_base = OTHER; note = 2'-O-methylguanosine-3'-phosphate
  modified_base 10: mod_base = OTHER; note = 2'-O-methyladenosine-3'-phosphate
  modified_base 11: mod_base = OTHER; note = 2'-O-methylguanosine-3'-phosphate
  modified_base 12: mod_base = OTHER; note = 2'-O-methylguanosine-3'-phosphate
  modified_base 13: mod_base = OTHER; note = 2'-O-methyladenosine-3'-phosphate
  modified_base 14: mod_base = OTHER; note = 2'-deoxy-2'-fluorouridine-3'-phosphate
  modified_base 15: mod_base = OTHER; note = 2'-O-methylguanosine-3'-phosphate
  modified_base 16: mod_base = OTHER; note = 2'-deoxy-2'-fluoroadenosine-3'-phosphate
  modified_base 17: mod_base = OTHER; note = 2'-O-methylcytidine-3'-phosphate
  modified_base 18: mod_base = OTHER; note = 2'-O-methyluridine-3'-phosphate
  modified_base 19: mod_base = OTHER; note = 2'-O-methyluridine-3'-phosphate
  modified_base 20: mod_base = OTHER; note = 2'-O-methylcytidine-3'-phosphate
  modified_base 21: mod_base = OTHER; note = 2'-O-methyladenosine-3'-phosphorothioate
  modified_base 22: mod_base = OTHER; note = 2'-O-methylguanosine-3'-phosphorothioate
  modified_base 23: mod_base = OTHER; note = 2'-O-methylguanosine
acccttctgaggatgacttcagg

SEQ ID NO: 975 - RNA, 23 nt, synthetic construct
  source 1..23: mol_type = other RNA
  modified_base 1: mod_base = OTHER; note = 2'-O-methyladenosine-3'-phosphorothioate
  modified_base 2: mod_base = OTHER; note = 2'-deoxy-2'-fluorouridine-3'-phosphorothioate
  modified_base 3: mod_base = OTHER; note = 2'-O-methylcytidine-3'-phosphate
  modified_base 4: mod_base = OTHER; note = 2'-O-methylcytidine-3'-phosphate
  modified_base 5: mod_base = OTHER; note = 2'-O-methylcytidine-3'-phosphate
  modified_base 6: mod_base = OTHER; note = 2'-deoxy-2'-fluorouridine-3'-phosphate
  modified_base 7: mod_base = OTHER; note = 2'-O-methyluridine-3'-phosphate
  modified_base 8: mod_base = OTHER; note = 2'-O-methylcytidine-3'-phosphate
  modified_base 9: mod_base = OTHER; note = 2'-O-methyluridine-3'-phosphate
  modified_base 10: mod_base = OTHER; note = 2'-O-methylguanosine-3'-phosphate
  modified_base 11: mod_base = OTHER; note = 2'-O-methyladenosine-3'-phosphate
  modified_base 12: mod_base = OTHER; note = 2'-O-methylguanosine-3'-phosphate
  modified_base 13: mod_base = OTHER; note = 2'-O-methylguanosine-3'-phosphate
  modified_base 14: mod_base = OTHER; note = 2'-deoxy-2'-fluoroadenosine-3'-phosphate
  modified_base 15: mod_base = OTHER; note = 2'-O-methyluridine-3'-phosphate
  modified_base 16: mod_base = OTHER; note = 2'-deoxy-2'-fluoroguanosine-3'-phosphate
  modified_base 17: mod_base = OTHER; note = 2'-O-methyladenosine-3'-phosphate
  modified_base 18: mod_base = OTHER; note = 2'-O-methylcytidine-3'-phosphate
  modified_base 19: mod_base = OTHER; note = 2'-O-methyluridine-3'-phosphate
  modified_base 20: mod_base = OTHER; note = 2'-O-methyluridine-3'-phosphate
  modified_base 21: mod_base = OTHER; note = 2'-O-methylcytidine-3'-phosphorothioate
  modified_base 22: mod_base = OTHER; note = 2'-O-methyladenosine-3'-phosphorothioate
  modified_base 23: mod_base = OTHER; note = 2'-O-methylguanosine
atcccttctgaggatgacttcag

SEQ ID NO: 976 - RNA, 23 nt, synthetic construct
  source 1..23: mol_type = other RNA
  modified_base 1: mod_base = OTHER; note = 2'-O-methyladenosine-3'-phosphorothioate
  modified_base 2: mod_base = OTHER; note = 2'-deoxy-2'-fluoroadenosine-3'-phosphorothioate
  modified_base 3: mod_base = OTHER; note = 2'-O-methyluridine-3'-phosphate
  modified_base 4: mod_base = OTHER; note = 2'-O-methylcytidine-3'-phosphate
  modified_base 5: mod_base = OTHER; note = 2'-O-methylcytidine-3'-phosphate
  modified_base 6: mod_base = OTHER; note = 2'-deoxy-2'-fluorocytidine-3'-phosphate
  modified_base 7: mod_base = OTHER; note = 2'-O-methyluridine-3'-phosphate
  modified_base 8: mod_base = OTHER; note = 2'-O-methyluridine-3'-phosphate
  modified_base 9: mod_base = OTHER; note = 2'-O-methylcytidine-3'-phosphate
  modified_base 10: mod_base = OTHER; note = 2'-O-methyluridine-3'-phosphate
  modified_base 11: mod_base = OTHER; note = 2'-O-methylguanosine-3'-phosphate
  modified_base 12: mod_base = OTHER; note = 2'-O-methyladenosine-3'-phosphate
  modified_base 13: mod_base = OTHER; note = 2'-O-methylguanosine-3'-phosphate
  modified_base 14: mod_base = OTHER; note = 2'-deoxy-2'-fluoroguanosine-3'-phosphate
  modified_base 15: mod_base = OTHER; note = 2'-O-methyladenosine-3'-phosphate
  modified_base 16: mod_base = OTHER; note = 2'-deoxy-2'-fluorouridine-3'-phosphate
  modified_base 17: mod_base = OTHER; note = 2'-O-methylguanosine-3'-phosphate
  modified_base 18: mod_base = OTHER; note = 2'-O-methyladenosine-3'-phosphate
  modified_base 19: mod_base = OTHER; note = 2'-O-methylcytidine-3'-phosphate
  modified_base 20: mod_base = OTHER; note = 2'-O-methyluridine-3'-phosphate
  modified_base 21: mod_base = OTHER; note = 2'-O-methyluridine-3'-phosphorothioate
  modified_base 22: mod_base = OTHER; note = 2'-O-methylcytidine-3'-phosphorothioate
  modified_base 23: mod_base = OTHER; note = 2'-O-methyladenosine
aatcccttctgaggatgacttca

SEQ ID NO: 977 - DNA, 23 bp, synthetic construct
  source 1..23: mol_type = other DNA
  modified_base 1: mod_base = OTHER; note = 2'-O-methyladenosine-3'-phosphorothioate
  modified_base 2: mod_base = OTHER; note = 2'-deoxy-2'-fluoroadenosine-3'-phosphorothioate
  modified_base 3: mod_base = OTHER; note = 2'-O-methyluridine-3'-phosphate
  modified_base 4: mod_base = OTHER; note = 2'-O-methylcytidine-3'-phosphate
  modified_base 6: mod_base = OTHER; note = 2'-O-methylcytidine-3'-phosphate
  modified_base 7: mod_base = OTHER; note = Thymidine-glycol nucleic acid (GNA), S-Isomer
  modified_base 8: mod_base = OTHER; note = 2'-O-methyluridine-3'-phosphate
  modified_base 9: mod_base = OTHER; note = 2'-O-methylcytidine-3'-phosphate
  modified_base 10: mod_base = OTHER; note = 2'-O-methyluridine-3'-phosphate
  modified_base 11: mod_base = OTHER; note = 2'-O-methylguanosine-3'-phosphate
  modified_base 12: mod_base = OTHER; note = 2'-O-methyladenosine-3'-phosphate
  modified_base 13: mod_base = OTHER; note = 2'-O-methylguanosine-3'-phosphate
  modified_base 14: mod_base = OTHER; note = 2'-deoxy-2'-fluoroguanosine-3'-phosphate
  modified_base 15: mod_base = OTHER; note = 2'-O-methyladenosine-3'-phosphate
  modified_base 16: mod_base = OTHER; note = 2'-deoxy-2'-fluorouridine-3'-phosphate
  modified_base 17: mod_base = OTHER; note = 2'-O-methylguanosine-3'-phosphate
  modified_base 18: mod_base = OTHER; note = 2'-O-methyladenosine-3'-phosphate
  modified_base 19: mod_base = OTHER; note = 2'-O-methylcytidine-3'-phosphate
  modified_base 20: mod_base = OTHER; note = 2'-O-methyluridine-3'-phosphate
  modified_base 21: mod_base = OTHER; note = 2'-O-methyluridine-3'-phosphorothioate
  modified_base 22: mod_base = OTHER; note = 2'-O-methylcytidine-3'-phosphorothioate
  modified_base 23: mod_base = OTHER; note = 2'-O-methyladenosine
  misc_feature 1..4: note = RNA
  misc_feature 6..23: note = RNA
  misc_feature 5: note = DNA
aatcccttctgaggatgacttca

SEQ ID NO: 978 - RNA, 23 nt, synthetic construct
  source 1..23: mol_type = other RNA
  modified_base 1: mod_base = OTHER; note = 2'-O-methyladenosine-3'-phosphorothioate
  modified_base 2: mod_base = OTHER; note = 2'-deoxy-2'-fluorocytidine-3'-phosphorothioate
  modified_base 3: mod_base = OTHER; note = 2'-O-methyladenosine-3'-phosphate
  modified_base 4: mod_base = OTHER; note = 2'-O-methyluridine-3'-phosphate
  modified_base 5: mod_base = OTHER; note = 2'-O-methylcytidine-3'-phosphate
  modified_base 6: mod_base = OTHER; note = 2'-deoxy-2'-fluorocytidine-3'-phosphate
  modified_base 7: mod_base = OTHER; note = 2'-O-methylcytidine-3'-phosphate
  modified_base 8: mod_base = OTHER; note = 2'-O-methyluridine-3'-phosphate
  modified_base 9: mod_base = OTHER; note = 2'-O-methyluridine-3'-phosphate
  modified_base 10: mod_base = OTHER; note = 2'-O-methylcytidine-3'-phosphate
  modified_base 11: mod_base = OTHER; note = 2'-O-methyluridine-3'-phosphate
  modified_base 12: mod_base = OTHER; note = 2'-O-methylguanosine-3'-phosphate
  modified_base 13: mod_base = OTHER; note = 2'-O-methyladenosine-3'-phosphate
  modified_base 14: mod_base = OTHER; note = 2'-deoxy-2'-fluoroguanosine-3'-phosphate
  modified_base 15: mod_base = OTHER; note = 2'-O-methylguanosine-3'-phosphate
  modified_base 16: mod_base = OTHER; note = 2'-deoxy-2'-fluoroadenosine-3'-phosphate
  modified_base 17: mod_base = OTHER; note = 2'-O-methyluridine-3'-phosphate
  modified_base 18: mod_base = OTHER; note = 2'-O-methylguanosine-3'-phosphate
  modified_base 19: mod_base = OTHER; note = 2'-O-methyladenosine-3'-phosphate
  modified_base 20: mod_base = OTHER; note = 2'-O-methylcytidine-3'-phosphate
  modified_base 21: mod_base = OTHER; note = 2'-O-methyluridine-3'-phosphorothioate
  modified_base 22: mod_base = OTHER; note = 2'-O-methyluridine-3'-phosphorothioate
  modified_base 23: mod_base = OTHER; note = 2'-O-methylcytidine
acatcccttctgaggatgacttc

SEQ ID NO: 979 - RNA, 23 nt, synthetic construct
  source 1..23: mol_type = other RNA
  modified_base 1: mod_base = OTHER; note = 2'-O-methyladenosine-3'-phosphorothioate
  modified_base 2: mod_base = OTHER; note = 2'-deoxy-2'-fluorouridine-3'-phosphorothioate
  modified_base 3: mod_base = OTHER; note = 2'-O-methylcytidine-3'-phosphate
  modified_base 4: mod_base = OTHER; note = 2'-O-methylcytidine-3'-phosphate
  modified_base 5: mod_base = OTHER; note = 2'-O-methyladenosine-3'-phosphate
  modified_base 6: mod_base = OTHER; note = 2'-deoxy-2'-fluorouridine-3'-phosphate
  modified_base 7: mod_base = OTHER; note = 2'-O-methylcytidine-3'-phosphate
  modified_base 8: mod_base = OTHER; note = 2'-O-methylcytidine-3'-phosphate
  modified_base 9: mod_base = OTHER; note = 2'-O-methylcytidine-3'-phosphate
  modified_base 10: mod_base = OTHER; note = 2'-O-methyluridine-3'-phosphate
  modified_base 11: mod_base = OTHER; note = 2'-O-methyluridine-3'-phosphate
  modified_base 12: mod_base = OTHER; note = 2'-O-methylcytidine-3'-phosphate
  modified_base 13: mod_base = OTHER; note = 2'-O-methyluridine-3'-phosphate
  modified_base 14: mod_base = OTHER; note = 2'-deoxy-2'-fluoroguanosine-3'-phosphate
  modified_base 15: mod_base = OTHER; note = 2'-O-methyladenosine-3'-phosphate
  modified_base 16: mod_base = OTHER; note = 2'-deoxy-2'-fluoroguanosine-3'-phosphate
  modified_base 17: mod_base = OTHER; note = 2'-O-methylguanosine-3'-phosphate
  modified_base 18: mod_base = OTHER; note = 2'-O-methyladenosine-3'-phosphate
  modified_base 19: mod_base = OTHER; note = 2'-O-methyluridine-3'-phosphate
  modified_base 20: mod_base = OTHER; note = 2'-O-methylguanosine-3'-phosphate
  modified_base 21: mod_base = OTHER; note = 2'-O-methyladenosine-3'-phosphorothioate
  modified_base 22: mod_base = OTHER; note = 2'-O-methylcytidine-3'-phosphorothioate
  modified_base 23: mod_base = OTHER; note = 2'-O-methyluridine
atccatcccttctgaggatgact

SEQ ID NO: 980 - DNA, 23 bp, synthetic construct
  source 1..23: mol_type = other DNA
  modified_base 1: mod_base = OTHER; note = 2'-O-methyladenosine-3'-phosphorothioate
  modified_base 2: mod_base = OTHER; note = 2'-deoxy-2'-fluoroguanosine-3'-phosphorothioate
  modified_base 3: mod_base = OTHER; note = 2'-O-methylguanosine-3'-phosphate
  modified_base 4: mod_base = OTHER; note = 2'-O-methyluridine-3'-phosphate
  modified_base 6: mod_base = OTHER; note = 2'-O-methyluridine-3'-phosphate
  modified_base 7: mod_base = OTHER; note = Adenosine-glycol nucleic acid (GNA), S-isomer
  modified_base 8: mod_base = OTHER; note = 2'-O-methylguanosine-3'-phosphate
  modified_base 9: mod_base = OTHER; note = 2'-O-methylcytidine-3'-phosphate
  modified_base 10: mod_base = OTHER; note = 2'-O-methyladenosine-3'-phosphate
  modified_base 11: mod_base = OTHER; note = 2'-O-methylguanosine-3'-phosphate
  modified_base 12: mod_base = OTHER; note = 2'-O-methylcytidine-3'-phosphate
  modified_base 13: mod_base = OTHER; note = 2'-O-methyluridine-3'-phosphate
  modified_base 14: mod_base = OTHER; note = 2'-deoxy-2'-fluorocytidine-3'-phosphate
  modified_base 15: mod_base = OTHER; note = 2'-O-methyladenosine-3'-phosphate
  modified_base 16: mod_base = OTHER; note = 2'-deoxy-2'-fluorouridine-3'-phosphate
  modified_base 17: mod_base = OTHER; note = 2'-O-methylcytidine-3'-phosphate
  modified_base 18: mod_base = OTHER; note = 2'-O-methyluridine-3'-phosphate
  modified_base 19: mod_base = OTHER; note = 2'-O-methylcytidine-3'-phosphate
  modified_base 20: mod_base = OTHER; note = 2'-O-methylcytidine-3'-phosphate
  modified_base 21: mod_base = OTHER; note = 2'-O-methylcytidine-3'-phosphorothioate
  modified_base 22: mod_base = OTHER; note = 2'-O-methyluridine-3'-phosphorothioate
  modified_base 23: mod_base = OTHER; note = 2'-O-methylcytidine
  misc_feature 1..4: note = RNA
  misc_feature 6..23: note = RNA
  misc_feature 5: note = DNA
aggtctagcagctcatctccctc

SEQ ID NO: 981 - DNA, 23 bp, synthetic construct
  source 1..23: mol_type = other DNA
  modified_base 1: mod_base = OTHER; note = 2'-O-methyladenosine-3'-phosphorothioate
  modified_base 2: mod_base = OTHER; note = 2'-deoxy-2'-fluorouridine-3'-phosphorothioate
  modified_base 3: mod_base = OTHER; note = 2'-O-methylguanosine-3'-phosphate
  modified_base 4: mod_base = OTHER; note = 2'-O-methylguanosine-3'-phosphate
  modified_base 6: mod_base = OTHER; note = 2'-O-methylcytidine-3'-phosphate
  modified_base 7: mod_base = OTHER; note = Thymidine-glycol nucleic acid (GNA), S-Isomer
  modified_base 8: mod_base = OTHER; note = 2'-O-methyladenosine-3'-phosphate
  modified_base 9: mod_base = OTHER; note = 2'-O-methylguanosine-3'-phosphate
  modified_base 10: mod_base = OTHER; note = 2'-O-methylcytidine-3'-phosphate
  modified_base 11: mod_base = OTHER; note = 2'-O-methyladenosine-3'-phosphate
  modified_base 12: mod_base = OTHER; note = 2'-O-methylguanosine-3'-phosphate
  modified_base 13: mod_base = OTHER; note = 2'-O-methylcytidine-3'-phosphate
  modified_base 14: mod_base = OTHER; note = 2'-deoxy-2'-fluorouridine-3'-phosphate
  modified_base 15: mod_base = OTHER; note = 2'-O-methylcytidine-3'-phosphate
  modified_base 16: mod_base = OTHER; note = 2'-deoxy-2'-fluoroadenosine-3'-phosphate
  modified_base 17: mod_base = OTHER; note = 2'-O-methyluridine-3'-phosphate
  modified_base 18: mod_base = OTHER; note = 2'-O-methylcytidine-3'-phosphate
  modified_base 19: mod_base = OTHER; note = 2'-O-methyluridine-3'-phosphate
  modified_base 20: mod_base = OTHER; note = 2'-O-methylcytidine-3'-phosphate
  modified_base 21: mod_base = OTHER; note = 2'-O-methylcytidine-3'-phosphorothioate
  modified_base 22: mod_base = OTHER; note = 2'-O-methylcytidine-3'-phosphorothioate
  modified_base 23: mod_base = OTHER; note = 2'-O-methyluridine
  misc_feature 1..4: note = RNA
  misc_feature 6..23: note = RNA
  misc_feature 5: note = DNA
atggtctagcagctcatctccct

SEQ ID NO: 982 - DNA, 23 bp, synthetic construct
  source 1..23: mol_type = other DNA
  modified_base 1: mod_base = OTHER; note = 2'-O-methyladenosine-3'-phosphorothioate
  modified_base 2: mod_base = OTHER; note = 2'-deoxy-2'-fluoroguanosine-3'-phosphorothioate
  modified_base 3: mod_base = OTHER; note = 2'-O-methylguanosine-3'-phosphate
  modified_base 4: mod_base = OTHER; note = 2'-O-methyluridine-3'-phosphate
  modified_base 6: mod_base = OTHER; note = 2'-O-methylguanosine-3'-phosphate
  modified_base 7: mod_base = OTHER; note = Thymidine-glycol nucleic acid (GNA), S-Isomer
  modified_base 8: mod_base = OTHER; note = 2'-O-methylcytidine-3'-phosphate
  modified_base 9: mod_base = OTHER; note = 2'-O-methyluridine-3'-phosphate
  modified_base 10: mod_base = OTHER; note = 2'-O-methyladenosine-3'-phosphate
  modified_base 11: mod_base = OTHER; note = 2'-O-methylguanosine-3'-phosphate
  modified_base 12: mod_base = OTHER; note = 2'-O-methylcytidine-3'-phosphate
  modified_base 13: mod_base = OTHER; note = 2'-O-methyladenosine-3'-phosphate
  modified_base 14: mod_base = OTHER; note = 2'-deoxy-2'-fluoroguanosine-3'-phosphate
  modified_base 15: mod_base = OTHER; note = 2'-O-methylcytidine-3'-phosphate
  modified_base 16: mod_base = OTHER; note = 2'-deoxy-2'-fluorouridine-3'-phosphate
  modified_base 17: mod_base = OTHER; note = 2'-O-methylcytidine-3'-phosphate
  modified_base 18: mod_base = OTHER; note = 2'-O-methyladenosine-3'-phosphate
  modified_base 19: mod_base = OTHER; note = 2'-O-methyluridine-3'-phosphate
  modified_base 20: mod_base = OTHER; note = 2'-O-methylcytidine-3'-phosphate
  modified_base 21: mod_base = OTHER; note = 2'-O-methyluridine-3'-phosphorothioate
  modified_base 22: mod_base = OTHER; note = 2'-O-methylcytidine-3'-phosphorothioate
  modified_base 23: mod_base = OTHER; note = 2'-O-methylcytidine
  misc_feature 1..4: note = RNA
  misc_feature 6..23: note = RNA
  misc_feature 5: note = DNA
aggtggtctagcagctcatctcc

SEQ ID NO: 983 - RNA, 23 nt, synthetic construct
  source 1..23: mol_type = other RNA
  modified_base 1: mod_base = OTHER; note = 2'-O-methyladenosine-3'-phosphorothioate
  modified_base 2: mod_base = OTHER; note = 2'-deoxy-2'-fluoroadenosine-3'-phosphorothioate
  modified_base 3: mod_base = OTHER; note = 2'-O-methylguanosine-3'-phosphate
  modified_base 4: mod_base = OTHER; note = 2'-O-methyladenosine-3'-phosphate
  modified_base 5: mod_base = OTHER; note = 2'-O-methylcytidine-3'-phosphate
  modified_base 6: mod_base = OTHER; note = 2'-deoxy-2'-fluoroguanosine-3'-phosphate
  modified_base 7: mod_base = OTHER; note = 2'-O-methylcytidine-3'-phosphate
  modified_base 8: mod_base = OTHER; note = 2'-O-methyladenosine-3'-phosphate
  modified_base 9: mod_base = OTHER; note = 2'-O-methylguanosine-3'-phosphate
  modified_base 10: mod_base = OTHER; note = 2'-O-methylguanosine-3'-phosphate
  modified_base 11: mod_base = OTHER; note = 2'-O-methyluridine-3'-phosphate
  modified_base 12: mod_base = OTHER; note = 2'-O-methylguanosine-3'-phosphate
  modified_base 13: mod_base = OTHER; note = 2'-O-methylguanosine-3'-phosphate
  modified_base 14: mod_base = OTHER; note = 2'-deoxy-2'-fluorouridine-3'-phosphate
  modified_base 15: mod_base = OTHER; note = 2'-O-methylcytidine-3'-phosphate
  modified_base 16: mod_base = OTHER; note = 2'-deoxy-2'-fluorouridine-3'-phosphate
  modified_base 17: mod_base = OTHER; note = 2'-O-methyladenosine-3'-phosphate
  modified_base 18: mod_base = OTHER; note = 2'-O-methylguanosine-3'-phosphate
  modified_base 19: mod_base = OTHER; note = 2'-O-methylcytidine-3'-phosphate
  modified_base 20: mod_base = OTHER; note = 2'-O-methyladenosine-3'-phosphate
  modified_base 21: mod_base = OTHER; note = 2'-O-methylguanosine-3'-phosphorothioate
  modified_base 22: mod_base = OTHER; note = 2'-O-methylcytidine-3'-phosphorothioate
  modified_base 23: mod_base = OTHER; note = 2'-O-methyluridine
aagacgcaggtggtctagcagct

SEQ ID NO: 984 - RNA, 23 nt, synthetic construct
  source 1..23: mol_type = other RNA
  modified_base 1: mod_base = OTHER; note = 2'-O-methyladenosine-3'-phosphorothioate
  modified_base 2: mod_base = OTHER; note = 2'-deoxy-2'-fluorocytidine-3'-phosphorothioate
  modified_base 3: mod_base = OTHER; note = 2'-O-methyluridine-3'-phosphate
  modified_base 4: mod_base = OTHER; note = 2'-O-methylguanosine-3'-phosphate
  modified_base 5: mod_base = OTHER; note = 2'-O-methyladenosine-3'-phosphate
  modified_base 6: mod_base = OTHER; note = 2'-deoxy-2'-fluoroguanosine-3'-phosphate
  modified_base 7: mod_base = OTHER; note = 2'-O-methyladenosine-3'-phosphate
  modified_base 8: mod_base = OTHER; note = 2'-O-methylcytidine-3'-phosphate
  modified_base 9: mod_base = OTHER; note = 2'-O-methylguanosine-3'-phosphate
  modified_base 10: mod_base = OTHER; note = 2'-O-methylcytidine-3'-phosphate
  modified_base 11: mod_base = OTHER; note = 2'-O-methyladenosine-3'-phosphate
  modified_base 12: mod_base = OTHER; note = 2'-O-methylguanosine-3'-phosphate
  modified_base 13: mod_base = OTHER; note = 2'-O-methylguanosine-3'-phosphate
  modified_base 14: mod_base = OTHER; note = 2'-deoxy-2'-fluorouridine-3'-phosphate
  modified_base 15: mod_base = OTHER; note = 2'-O-methylguanosine-3'-phosphate
  modified_base 16: mod_base = OTHER; note = 2'-deoxy-2'-fluoroguanosine-3'-phosphate
  modified_base 17: mod_base = OTHER; note = 2'-O-methyluridine-3'-phosphate
  modified_base 18: mod_base = OTHER; note = 2'-O-methylcytidine-3'-phosphate
  modified_base 19: mod_base = OTHER; note = 2'-O-methyluridine-3'-phosphate
  modified_base 20: mod_base = OTHER; note = 2'-O-methyladenosine-3'-phosphate
  modified_base 21: mod_base = OTHER; note = 2'-O-methylguanosine-3'-phosphorothioate
  modified_base 22: mod_base = OTHER; note = 2'-O-methylcytidine-3'-phosphorothioate
  modified_base 23: mod_base = OTHER; note = 2'-O-methyladenosine
actgagacgcaggtggtctagca

SEQ ID NO: 985 - DNA, 23 bp, synthetic construct
  source 1..23: mol_type = other DNA
  modified_base 1: mod_base = OTHER; note = 2'-O-methyladenosine-3'-phosphorothioate
  modified_base 2: mod_base = OTHER; note = 2'-deoxy-2'-fluorocytidine-3'-phosphorothioate
  modified_base 3: mod_base = OTHER; note = 2'-O-methyluridine-3'-phosphate
  modified_base 4: mod_base = OTHER; note = 2'-O-methylguanosine-3'-phosphate
  modified_base 6: mod_base = OTHER; note = 2'-O-methylguanosine-3'-phosphate
  modified_base 7: mod_base = OTHER; note = Adenosine-glycol nucleic acid (GNA), S-isomer
  modified_base 8: mod_base = OTHER; note = 2'-O-methylcytidine-3'-phosphate
  modified_base 9: mod_base = OTHER; note = 2'-O-methylguanosine-3'-phosphate
  modified_base 10: mod_base = OTHER; note = 2'-O-methylcytidine-3'-phosphate
  modified_base 11: mod_base = OTHER; note = 2'-O-methyladenosine-3'-phosphate
  modified_base 12: mod_base = OTHER; note = 2'-O-methylguanosine-3'-phosphate
  modified_base 13: mod_base = OTHER; note = 2'-O-methylguanosine-3'-phosphate
  modified_base 14: mod_base = OTHER; note = 2'-deoxy-2'-fluorouridine-3'-phosphate
  modified_base 15: mod_base = OTHER; note = 2'-O-methylguanosine-3'-phosphate
  modified_base 16: mod_base = OTHER; note = 2'-deoxy-2'-fluoroguanosine-3'-phosphate
  modified_base 17: mod_base = OTHER; note = 2'-O-methyluridine-3'-phosphate
  modified_base 18: mod_base = OTHER; note = 2'-O-methylcytidine-3'-phosphate
  modified_base 19: mod_base = OTHER; note = 2'-O-methyluridine-3'-phosphate
  modified_base 20: mod_base = OTHER; note = 2'-O-methyladenosine-3'-phosphate
  modified_base 21: mod_base = OTHER; note = 2'-O-methylguanosine-3'-phosphorothioate
  modified_base 22: mod_base = OTHER; note = 2'-O-methylcytidine-3'-phosphorothioate
  modified_base 23: mod_base = OTHER; note = 2'-O-methyladenosine
  misc_feature 1..4: note = RNA
  misc_feature 6..23: note = RNA
  misc_feature 5: note = DNA
actgagacgcaggtggtctagca

SEQ ID NO: 986 - DNA, 23 bp, synthetic construct
  source 1..23: mol_type = other DNA
  modified_base 1: mod_base = OTHER; note = 2'-O-methyladenosine-3'-phosphorothioate
  modified_base 2: mod_base = OTHER; note = 2'-deoxy-2'-fluoroguanosine-3'-phosphorothioate
  modified_base 3: mod_base = OTHER; note = 2'-O-methyladenosine-3'-phosphate
  modified_base 4: mod_base = OTHER; note = 2'-O-methyluridine-3'-phosphate
  modified_base 6: mod_base = OTHER; note = 2'-O-methylcytidine-3'-phosphate
  modified_base 7: mod_base = OTHER; note = Thymidine-glycol nucleic acid (GNA), S-Isomer
  modified_base 8: mod_base = OTHER; note = 2'-O-methylguanosine-3'-phosphate
  modified_base 9: mod_base = OTHER; note = 2'-O-methyladenosine-3'-phosphate
  modified_base 10: mod_base = OTHER; note = 2'-O-methylguanosine-3'-phosphate
  modified_base 11: mod_base = OTHER; note = 2'-O-methyladenosine-3'-phosphate
  modified_base 12: mod_base = OTHER; note = 2'-O-methylcytidine-3'-phosphate
  modified_base 13: mod_base = OTHER; note = 2'-O-methylguanosine-3'-phosphate
  modified_base 14: mod_base = OTHER; note = 2'-deoxy-2'-fluorocytidine-3'-phosphate
  modified_base 15: mod_base = OTHER; note = 2'-O-methyladenosine-3'-phosphate
  modified_base 16: mod_base = OTHER; note = 2'-deoxy-2'-fluoroguanosine-3'-phosphate
  modified_base 17: mod_base = OTHER; note = 2'-O-methylguanosine-3'-phosphate
  modified_base 18: mod_base = OTHER; note = 2'-O-methyluridine-3'-phosphate
  modified_base 19: mod_base = OTHER; note = 2'-O-methylguanosine-3'-phosphate
  modified_base 20: mod_base = OTHER; note = 2'-O-methylguanosine-3'-phosphate
  modified_base 21: mod_base = OTHER; note = 2'-O-methyluridine-3'-phosphorothioate
  modified_base 22: mod_base = OTHER; note = 2'-O-methylcytidine-3'-phosphorothioate
  modified_base 23: mod_base = OTHER; note = 2'-O-methyluridine
  misc_feature 1..4: note = RNA
  misc_feature 6..23: note = RNA
  misc_feature 5: note = DNA
agatgctgagacgcaggtggtct

SEQ ID NO: 987 - DNA, 23 bp, synthetic construct
  source 1..23: mol_type = other DNA
  modified_base 1: mod_base = OTHER; note = 2'-O-methyladenosine-3'-phosphorothioate
  modified_base 2: mod_base = OTHER; note = 2'-deoxy-2'-fluoroadenosine-3'-phosphorothioate
  modified_base 3: mod_base = OTHER; note = 2'-O-methylguanosine-3'-phosphate
  modified_base 4: mod_base = OTHER; note = 2'-O-methylguanosine-3'-phosphate
  modified_base 6: mod_base = OTHER; note = 2'-O-methylcytidine-3'-phosphate
  modified_base 7: mod_base = OTHER; note = Adenosine-glycol nucleic acid (GNA), S-isomer
  modified_base 8: mod_base = OTHER; note = 2'-O-methylguanosine-3'-phosphate
  modified_base 9: mod_base = OTHER; note = 2'-O-methylguanosine-3'-phosphate
  modified_base 10: mod_base = OTHER; note = 2'-O-methyladenosine-3'-phosphate
  modified_base 11: mod_base = OTHER; note = 2'-O-methyluridine-3'-phosphate
  modified_base 12: mod_base = OTHER; note = 2'-O-methylguanosine-3'-phosphate
  modified_base 13: mod_base = OTHER; note = 2'-O-methylcytidine-3'-phosphate
  modified_base 14: mod_base = OTHER; note = 2'-deoxy-2'-fluorouridine-3'-phosphate
  modified_base 15: mod_base = OTHER; note = 2'-O-methylguanosine-3'-phosphate
  modified_base 16: mod_base = OTHER; note = 2'-deoxy-2'-fluoroadenosine-3'-phosphate
  modified_base 17: mod_base = OTHER; note = 2'-O-methylguanosine-3'-phosphate
  modified_base 18: mod_base = OTHER; note = 2'-O-methyladenosine-3'-phosphate
  modified_base 19: mod_base = OTHER; note = 2'-O-methylcytidine-3'-phosphate
  modified_base 20: mod_base = OTHER; note = 2'-O-methylguanosine-3'-phosphate
  modified_base 21: mod_base = OTHER; note = 2'-O-methylcytidine-3'-phosphorothioate
  modified_base 22: mod_base = OTHER; note = 2'-O-methyladenosine-3'-phosphorothioate
  modified_base 23: mod_base = OTHER; note = 2'-O-methylguanosine
  misc_feature 1..4: note = RNA
  misc_feature 6..23: note = RNA
  misc_feature 5: note = DNA
aagggcaggatgctgagacgcag

SEQ ID NO: 988 - RNA, 23 nt, synthetic construct
  source 1..23: mol_type = other RNA
  modified_base 1: mod_base = OTHER; note = 2'-O-methyladenosine-3'-phosphorothioate
  modified_base 2: mod_base = OTHER; note = 2'-deoxy-2'-fluorocytidine-3'-phosphorothioate
  modified_base 3: mod_base = OTHER; note = 2'-O-methyluridine-3'-phosphate
  modified_base 4: mod_base = OTHER; note = 2'-O-methylcytidine-3'-phosphate
  modified_base 5: mod_base = OTHER; note = 2'-O-methyladenosine-3'-phosphate
  modified_base 6: mod_base = OTHER; note = 2'-deoxy-2'-fluorouridine-3'-phosphate
  modified_base 7: mod_base = OTHER; note = 2'-O-methylcytidine-3'-phosphate
  modified_base 8: mod_base = OTHER; note = 2'-O-methylcytidine-3'-phosphate
  modified_base 9: mod_base = OTHER; note = 2'-O-methylcytidine-3'-phosphate
  modified_base 10: mod_base = OTHER; note = 2'-O-methyladenosine-3'-phosphate
  modified_base 11: mod_base = OTHER; note = 2'-O-methylguanosine-3'-phosphate
  modified_base 12: mod_base = OTHER; note = 2'-O-methylguanosine-3'-phosphate
  modified_base 13: mod_base = OTHER; note = 2'-O-methylguanosine-3'-phosphate
  modified_base 14: mod_base = OTHER; note = 2'-deoxy-2'-fluorocytidine-3'-phosphate
  modified_base 15: mod_base = OTHER; note = 2'-O-methyladenosine-3'-phosphate
  modified_base 16: mod_base = OTHER; note = 2'-deoxy-2'-fluoroguanosine-3'-phosphate
  modified_base 17: mod_base = OTHER; note = 2'-O-methylguanosine-3'-phosphate
  modified_base 18: mod_base = OTHER; note = 2'-O-methyladenosine-3'-phosphate
  modified_base 19: mod_base = OTHER; note = 2'-O-methyluridine-3'-phosphate
  modified_base 20: mod_base = OTHER; note = 2'-O-methylguanosine-3'-phosphate
  modified_base 21: mod_base = OTHER; note = 2'-O-methylcytidine-3'-phosphorothioate
  modified_base 22: mod_base = OTHER; note = 2'-O-methyluridine-3'-phosphorothioate
  modified_base 23: mod_base = OTHER; note = 2'-O-methylguanosine
actcatcccagggcaggatgctg

SEQ ID NO: 989 - DNA, 23 bp, synthetic construct
  source 1..23: mol_type = other DNA
  modified_base 1: mod_base = OTHER; note = 2'-O-methyladenosine-3'-phosphorothioate
  modified_base 2: mod_base = OTHER; note = 2'-deoxy-2'-fluorouridine-3'-phosphorothioate
  modified_base 3: mod_base = OTHER; note = 2'-O-methylcytidine-3'-phosphate
  modified_base 4: mod_base = OTHER; note = 2'-O-methyluridine-3'-phosphate
  modified_base 6: mod_base = OTHER; note = 2'-O-methyladenosine-3'-phosphate
  modified_base 7: mod_base = OTHER; note = Thymidine-glycol nucleic acid (GNA), S-Isomer
  modified_base 8: mod_base = OTHER; note = 2'-O-methylcytidine-3'-phosphate
  modified_base 9: mod_base = OTHER; note = 2'-O-methylcytidine-3'-phosphate
  modified_base 10: mod_base = OTHER; note = 2'-O-methylcytidine-3'-phosphate
  modified_base 11: mod_base = OTHER; note = 2'-O-methyladenosine-3'-phosphate
  modified_base 12: mod_base = OTHER; note = 2'-O-methylguanosine-3'-phosphate
  modified_base 13: mod_base = OTHER; note = 2'-O-methylguanosine-3'-phosphate
  modified_base 14: mod_base = OTHER; note = 2'-deoxy-2'-fluoroguanosine-3'-phosphate
  modified_base 15: mod_base = OTHER; note = 2'-O-methylcytidine-3'-phosphate
  modified_base 16: mod_base = OTHER; note = 2'-deoxy-2'-fluoroadenosine-3'-phosphate
  modified_base 17: mod_base = OTHER; note = 2'-O-methylguanosine-3'-phosphate
  modified_base 18: mod_base = OTHER; note = 2'-O-methylguanosine-3'-phosphate
  modified_base 19: mod_base = OTHER; note = 2'-O-methyladenosine-3'-phosphate
  modified_base 20: mod_base = OTHER; note = 2'-O-methyluridine-3'-phosphate
  modified_base 21: mod_base = OTHER; note = 2'-O-methylguanosine-3'-phosphorothioate
  modified_base 22: mod_base = OTHER; note = 2'-O-methylcytidine-3'-phosphorothioate
  modified_base 23: mod_base = OTHER; note = 2'-O-methyluridine
  misc_feature 1..4: note = RNA
  misc_feature 6..23: note = RNA
  misc_feature 5: note = DNA
atctcatcccagggcaggatgct

SEQ ID NO: 990 - DNA, 23 bp, synthetic construct
  source 1..23: mol_type = other DNA
  modified_base 1: mod_base = OTHER; note = 2'-O-methyladenosine-3'-phosphorothioate
  modified_base 2: mod_base = OTHER; note = 2'-deoxy-2'-fluorocytidine-3'-phosphorothioate
  modified_base 3: mod_base = OTHER; note = 2'-O-methyluridine-3'-phosphate
  modified_base 4: mod_base = OTHER; note = 2'-O-methylcytidine-3'-phosphate
  modified_base 6: mod_base = OTHER; note = 2'-O-methylcytidine-3'-phosphate
  modified_base 7: mod_base = OTHER; note = Adenosine-glycol nucleic acid (GNA), S-isomer
  modified_base 8: mod_base = OTHER; note = 2'-O-methyluridine-3'-phosphate
  modified_base 9: mod_base = OTHER; note = 2'-O-methylcytidine-3'-phosphate
  modified_base 10: mod_base = OTHER; note = 2'-O-methylcytidine-3'-phosphate
  modified_base 11: mod_base = OTHER; note = 2'-O-methylcytidine-3'-phosphate
  modified_base 12: mod_base = OTHER; note = 2'-O-methyladenosine-3'-phosphate
  modified_base 13: mod_base = OTHER; note = 2'-O-methylguanosine-3'-phosphate
  modified_base 14: mod_base = OTHER; note = 2'-deoxy-2'-fluoroguanosine-3'-phosphate
  modified_base 15: mod_base = OTHER; note = 2'-O-methylguanosine-3'-phosphate
  modified_base 16: mod_base = OTHER; note = 2'-deoxy-2'-fluorocytidine-3'-phosphate
  modified_base 17: mod_base = OTHER; note = 2'-O-methyladenosine-3'-phosphate
  modified_base 18: mod_base = OTHER; note = 2'-O-methylguanosine-3'-phosphate
  modified_base 19: mod_base = OTHER; note = 2'-O-methylguanosine-3'-phosphate
  modified_base 20: mod_base = OTHER; note = 2'-O-methyladenosine-3'-phosphate
  modified_base 21: mod_base = OTHER; note = 2'-O-methyluridine-3'-phosphorothioate
  modified_base 22: mod_base = OTHER; note = 2'-O-methylguanosine-3'-phosphorothioate
  modified_base 23: mod_base = OTHER; note = 2'-O-methylcytidine
  misc_feature 1..4: note = RNA
  misc_feature 6..23: note = RNA
  misc_feature 5: note = DNA
actctcatcccagggcaggatgc

SEQ ID NO: 991 - DNA, 23 bp, synthetic construct
  source 1..23: mol_type = other DNA
  modified_base 1: mod_base = OTHER; note = 2'-O-methyladenosine-3'-phosphorothioate
  modified_base 2: mod_base = OTHER; note = 2'-deoxy-2'-fluoroguanosine-3'-phosphorothioate
  modified_base 3: mod_base = OTHER; note = 2'-O-methyladenosine-3'-phosphate
  modified_base 4: mod_base = OTHER; note = 2'-O-methyluridine-3'-phosphate
  modified_base 6: mod_base = OTHER; note = 2'-O-methylcytidine-3'-phosphate
  modified_base 7: mod_base = OTHER; note = Thymidine-glycol nucleic acid (GNA), S-Isomer
  modified_base 8: mod_base = OTHER; note = 2'-O-methylcytidine-3'-phosphate
  modified_base 9: mod_base = OTHER; note = 2'-O-methyluridine-3'-phosphate
  modified_base 10: mod_base = OTHER; note = 2'-O-methylcytidine-3'-phosphate
  modified_base 11: mod_base = OTHER; note = 2'-O-methyladenosine-3'-phosphate
  modified_base 12: mod_base = OTHER; note = 2'-O-methyluridine-3'-phosphate
  modified_base 13: mod_base = OTHER; note = 2'-O-methylcytidine-3'-phosphate
  modified_base 14: mod_base = OTHER; note = 2'-deoxy-2'-fluorocytidine-3'-phosphate
  modified_base 15: mod_base = OTHER; note = 2'-O-methylcytidine-3'-phosphate
  modified_base 16: mod_base = OTHER; note = 2'-deoxy-2'-fluoroadenosine-3'-phosphate
  modified_base 17: mod_base = OTHER; note = 2'-O-methylguanosine-3'-phosphate
  modified_base 18: mod_base = OTHER; note = 2'-O-methylguanosine-3'-phosphate
  modified_base 19: mod_base = OTHER; note = 2'-O-methylguanosine-3'-phosphate
  modified_base 20: mod_base = OTHER; note = 2'-O-methylcytidine-3'-phosphate
  modified_base 21: mod_base = OTHER; note = 2'-O-methyladenosine-3'-phosphorothioate
  modified_base 22: mod_base = OTHER; note = 2'-O-methylguanosine-3'-phosphorothioate
  modified_base 23: mod_base = OTHER; note = 2'-O-methylguanosine
  misc_feature 1..4: note = RNA
  misc_feature 6..23: note = RNA
  misc_feature 5: note = DNA
agatgctctcatcccagggcagg

SEQ ID NO: 992 - RNA, 23 nt, synthetic construct
  source 1..23: mol_type = other RNA
  modified_base 1: mod_base = OTHER; note = 2'-O-methyladenosine-3'-phosphorothioate
  modified_base 2: mod_base = OTHER; note = 2'-deoxy-2'-fluorocytidine-3'-phosphorothioate
  modified_base 3: mod_base = OTHER; note = 2'-O-methyladenosine-3'-phosphate
  modified_base 4: mod_base = OTHER; note = 2'-O-methylguanosine-3'-phosphate
  modified_base 5: mod_base = OTHER; note = 2'-O-methylguanosine-3'-phosphate
  modified_base 6: mod_base = OTHER; note = 2'-deoxy-2'-fluoroadenosine-3'-phosphate
  modified_base 7: mod_base = OTHER; note = 2'-O-methyluridine-3'-phosphate
  modified_base 8: mod_base = OTHER; note = 2'-O-methylguanosine-3'-phosphate
  modified_base 9: mod_base = OTHER; note = 2'-O-methylcytidine-3'-phosphate
  modified_base 10: mod_base = OTHER; note = 2'-O-methyluridine-3'-phosphate
  modified_base 11: mod_base = OTHER; note = 2'-O-methylcytidine-3'-phosphate
  modified_base 12: mod_base = OTHER; note = 2'-O-methyluridine-3'-phosphate
  modified_base 13: mod_base = OTHER; note = 2'-O-methylcytidine-3'-phosphate
  modified_base 14: mod_base = OTHER; note = 2'-deoxy-2'-fluoroadenosine-3'-phosphate
  modified_base 15: mod_base = OTHER; note = 2'-O-methyluridine-3'-phosphate
  modified_base 16: mod_base = OTHER; note = 2'-deoxy-2'-fluorocytidine-3'-phosphate
  modified_base 17: mod_base = OTHER; note = 2'-O-methylcytidine-3'-phosphate
  modified_base 18: mod_base = OTHER; note = 2'-O-methylcytidine-3'-phosphate
  modified_base 19: mod_base = OTHER; note = 2'-O-methyladenosine-3'-phosphate
  modified_base 20: mod_base = OTHER; note = 2'-O-methylguanosine-3'-phosphate
  modified_base 21: mod_base = OTHER; note = 2'-O-methylguanosine-3'-phosphorothioate
  modified_base 22: mod_base = OTHER; note = 2'-O-methylguanosine-3'-phosphorothioate
  modified_base 23: mod_base = OTHER; note = 2'-O-methylcytidine
acaggatgctctcatcccagggc

SEQ ID NO: 993 - RNA, 23 nt, synthetic construct
  source 1..23: mol_type = other RNA
  modified_base 1: mod_base = OTHER; note = 2'-O-methyladenosine-3'-phosphorothioate
  modified_base 2: mod_base = OTHER; note = 2'-deoxy-2'-fluoroadenosine-3'-phosphorothioate
  modified_base 3: mod_base = OTHER; note = 2'-O-methyluridine-3'-phosphate
  modified_base 4: mod_base = OTHER; note = 2'-O-methylcytidine-3'-phosphate
  modified_base 5: mod_base = OTHER; note = 2'-O-methylcytidine-3'-phosphate
  modified_base 6: mod_base = OTHER; note = 2'-deoxy-2'-fluoroadenosine-3'-phosphate
  modified_base 7: mod_base = OTHER; note = 2'-O-methylcytidine-3'-phosphate
  modified_base 8: mod_base = OTHER; note = 2'-O-methylcytidine-3'-phosphate
  modified_base 9: mod_base = OTHER; note = 2'-O-methyluridine-3'-phosphate
  modified_base 10: mod_base = OTHER; note = 2'-O-methyluridine-3'-phosphate
  modified_base 11: mod_base = OTHER; note = 2'-O-methyluridine-3'-phosphate
  modified_base 12: mod_base = OTHER; note = 2'-O-methylguanosine-3'-phosphate
  modified_base 13: mod_base = OTHER; note = 2'-O-methyluridine-3'-phosphate
  modified_base 14: mod_base = OTHER; note = 2'-deoxy-2'-fluorocytidine-3'-phosphate
  modified_base 15: mod_base = OTHER; note = 2'-O-methyluridine-3'-phosphate
  modified_base 16: mod_base = OTHER; note = 2'-deoxy-2'-fluorouridine-3'-phosphate
  modified_base 17: mod_base = OTHER; note = 2'-O-methyluridine-3'-phosphate
  modified_base 18: mod_base = OTHER; note = 2'-O-methylcytidine-3'-phosphate
  modified_base 19: mod_base = OTHER; note = 2'-O-methyladenosine-3'-phosphate
  modified_base 20: mod_base = OTHER; note = 2'-O-methyluridine-3'-phosphate
  modified_base 21: mod_base = OTHER; note = 2'-O-methyluridine-3'-phosphorothioate
  modified_base 22: mod_base = OTHER; note = 2'-O-methyluridine-3'-phosphorothioate
  modified_base 23: mod_base = OTHER; note = 2'-O-methylcytidine
aatccacctttgtctttcatttc

SEQ ID NO: 994 - DNA, 23 bp, synthetic construct
  source 1..23: mol_type = other DNA
  modified_base 1: mod_base = OTHER; note = 2'-O-methyladenosine-3'-phosphorothioate
  modified_base 2: mod_base = OTHER; note = 2'-deoxy-2'-fluorouridine-3'-phosphorothioate
  modified_base 3: mod_base = OTHER; note = 2'-O-methyladenosine-3'-phosphate
  modified_base 4: mod_base = OTHER; note = 2'-O-methyluridine-3'-phosphate
  modified_base 6: mod_base = OTHER; note = 2'-O-methylcytidine-3'-phosphate
  modified_base 7: mod_base = OTHER; note = Adenosine-glycol nucleic acid (GNA), S-isomer
  modified_base 8: mod_base = OTHER; note = 2'-O-methylcytidine-3'-phosphate
  modified_base 9: mod_base = OTHER; note = 2'-O-methylcytidine-3'-phosphate
  modified_base 10: mod_base = OTHER; note = 2'-O-methyluridine-3'-phosphate
  modified_base 11: mod_base = OTHER; note = 2'-O-methyluridine-3'-phosphate
  modified_base 12: mod_base = OTHER; note = 2'-O-methyluridine-3'-phosphate
  modified_base 13: mod_base = OTHER; note = 2'-O-methylguanosine-3'-phosphate
  modified_base 14: mod_base = OTHER; note = 2'-deoxy-2'-fluorouridine-3'-phosphate
  modified_base 15: mod_base = OTHER; note = 2'-O-methylcytidine-3'-phosphate
  modified_base 16: mod_base = OTHER; note = 2'-deoxy-2'-fluorouridine-3'-phosphate
  modified_base 17: mod_base = OTHER; note = 2'-O-methyluridine-3'-phosphate
  modified_base 18: mod_base = OTHER; note = 2'-O-methyluridine-3'-phosphate
  modified_base 19: mod_base = OTHER; note = 2'-O-methylcytidine-3'-phosphate
  modified_base 20: mod_base = OTHER; note = 2'-O-methyladenosine-3'-phosphate
  modified_base 21: mod_base = OTHER; note = 2'-O-methyluridine-3'-phosphorothioate
  modified_base 22: mod_base = OTHER; note = 2'-O-methyluridine-3'-phosphorothioate
  modified_base 23: mod_base = OTHER; note = 2'-O-methyluridine
  misc_feature 1..4: note = RNA
  misc_feature 6..23: note = RNA
  misc_feature 5: note = DNA
atatccacctttgtctttcattt

SEQ ID NO: 995 - DNA, 23 bp, synthetic construct
  source 1..23: mol_type = other DNA
  modified_base 1: mod_base = OTHER; note = 2'-O-methyladenosine-3'-phosphorothioate
  modified_base 2: mod_base = OTHER; note = 2'-deoxy-2'-fluorouridine-3'-phosphorothioate
  modified_base 3: mod_base = OTHER; note = 2'-O-methylcytidine-3'-phosphate
  modified_base 4: mod_base = OTHER; note = 2'-O-methyladenosine-3'-phosphate
  modified_base 6: mod_base = OTHER; note = 2'-O-methylguanosine-3'-phosphate
  modified_base 7: mod_base = OTHER; note = Thymidine-glycol nucleic acid (GNA), S-Isomer
  modified_base 8: mod_base = OTHER; note = 2'-O-methyladenosine-3'-phosphate
  modified_base 9: mod_base = OTHER; note = 2'-O-methyluridine-3'-phosphate
  modified_base 10: mod_base = OTHER; note = 2'-O-methylcytidine-3'-phosphate
  modified_base 11: mod_base = OTHER; note = 2'-O-methylcytidine-3'-phosphate
  modified_base 12: mod_base = OTHER; note = 2'-O-methyladenosine-3'-phosphate
  modified_base 13: mod_base = OTHER; note = 2'-O-methylcytidine-3'-phosphate
  modified_base 14: mod_base = OTHER; note = 2'-deoxy-2'-fluorocytidine-3'-phosphate
  modified_base 15: mod_base = OTHER; note = 2'-O-methyluridine-3'-phosphate
  modified_base 16: mod_base = OTHER; note = 2'-deoxy-2'-fluorouridine-3'-phosphate
  modified_base 17: mod_base = OTHER; note = 2'-O-methyluridine-3'-phosphate
  modified_base 18: mod_base = OTHER; note = 2'-O-methylguanosine-3'-phosphate
  modified_base 19: mod_base = OTHER; note = 2'-O-methyluridine-3'-phosphate
  modified_base 20: mod_base = OTHER; note = 2'-O-methylcytidine-3'-phosphate
  modified_base 21: mod_base = OTHER; note = 2'-O-methyluridine-3'-phosphorothioate
  modified_base 22: mod_base = OTHER; note = 2'-O-methyluridine-3'-phosphorothioate
  modified_base 23: mod_base = OTHER; note = 2'-O-methyluridine
  misc_feature 1..4: note = RNA
  misc_feature 6..23: note = RNA
  misc_feature 5: note = DNA
atcatgtatccacctttgtcttt

SEQ ID NO: 996 - RNA, 23 nt, synthetic construct
  source 1..23: mol_type = other RNA
  modified_base 1: mod_base = OTHER; note = 2'-O-methyladenosine-3'-phosphorothioate
  modified_base 2: mod_base = OTHER; note = 2'-deoxy-2'-fluoroguanosine-3'-phosphorothioate
  modified_base 3: mod_base = OTHER; note = 2'-O-methylcytidine-3'-phosphate
  modified_base 4: mod_base = OTHER; note = 2'-O-methyluridine-3'-phosphate
  modified_base 5: mod_base = OTHER; note = 2'-O-methylcytidine-3'-phosphate
  modified_base 6: mod_base = OTHER; note = 2'-deoxy-2'-fluoroadenosine-3'-phosphate
  modified_base 7: mod_base = OTHER; note = 2'-O-methyluridine-3'-phosphate
  modified_base 8: mod_base = OTHER; note = 2'-O-methylguanosine-3'-phosphate
  modified_base 9: mod_base = OTHER; note = 2'-O-methyluridine-3'-phosphate
  modified_base 10: mod_base = OTHER; note = 2'-O-methyladenosine-3'-phosphate
  modified_base 11: mod_base = OTHER; note = 2'-O-methyluridine-3'-phosphate
  modified_base 12: mod_base = OTHER; note = 2'-O-methylcytidine-3'-phosphate
  modified_base 13: mod_base = OTHER; note = 2'-O-methylcytidine-3'-phosphate
  modified_base 14: mod_base = OTHER; note = 2'-deoxy-2'-fluoroadenosine-3'-phosphate
  modified_base 15: mod_base = OTHER; note = 2'-O-methylcytidine-3'-phosphate
  modified_base 16: mod_base = OTHER; note = 2'-deoxy-2'-fluorocytidine-3'-phosphate
  modified_base 17: mod_base = OTHER; note = 2'-O-methyluridine-3'-phosphate
  modified_base 18: mod_base = OTHER; note = 2'-O-methyluridine-3'-phosphate
  modified_base 19: mod_base = OTHER; note = 2'-O-methyluridine-3'-phosphate
  modified_base 20: mod_base = OTHER; note = 2'-O-methylguanosine-3'-phosphate
  modified_base 21: mod_base = OTHER; note = 2'-O-methyluridine-3'-phosphorothioate
  modified_base 22: mod_base = OTHER; note = 2'-O-methylcytidine-3'-phosphorothioate
  modified_base 23: mod_base = OTHER; note = 2'-O-methyluridine
agctcatgtatccacctttgtct

SEQ ID NO: 997 - DNA, 23 bp, synthetic construct
  source 1..23: mol_type = other DNA
  modified_base 1: mod_base = OTHER; note = 2'-O-methyladenosine-3'-phosphorothioate
  modified_base 2: mod_base = OTHER; note = 2'-deoxy-2'-fluorouridine-3'-phosphorothioate
  modified_base 3: mod_base = OTHER; note = 2'-O-methylguanosine-3'-phosphate
  modified_base 4: mod_base = OTHER; note = 2'-O-methylcytidine-3'-phosphate
  modified_base 6: mod_base = OTHER; note = 2'-O-methylcytidine-3'-phosphate
  modified_base 7: mod_base = OTHER; note = Adenosine-glycol nucleic acid (GNA), S-isomer
  modified_base 8: mod_base = OTHER; note = 2'-O-methyluridine-3'-phosphate
  modified_base 9: mod_base = OTHER; note = 2'-O-methylguanosine-3'-phosphate
  modified_base 10: mod_base = OTHER; note = 2'-O-methyluridine-3'-phosphate
  modified_base 11: mod_base = OTHER; note = 2'-O-methyladenosine-3'-phosphate
  modified_base 12: mod_base = OTHER; note = 2'-O-methyluridine-3'-phosphate
  modified_base 13: mod_base = OTHER; note = 2'-O-methylcytidine-3'-phosphate
  modified_base 14: mod_base = OTHER; note = 2'-deoxy-2'-fluorocytidine-3'-phosphate
  modified_base 15: mod_base = OTHER; note = 2'-O-methyladenosine-3'-phosphate
  modified_base 16: mod_base = OTHER; note = 2'-deoxy-2'-fluorocytidine-3'-phosphate
  modified_base 17: mod_base = OTHER; note = 2'-O-methylcytidine-3'-phosphate
  modified_base 18: mod_base = OTHER; note = 2'-O-methyluridine-3'-phosphate
  modified_base 19: mod_base = OTHER; note = 2'-O-methyluridine-3'-phosphate
  modified_base 20: mod_base = OTHER; note = 2'-O-methyluridine-3'-phosphate
  modified_base 21: mod_base = OTHER; note = 2'-O-methylguanosine-3'-phosphorothioate
  modified_base 22: mod_base = OTHER; note = 2'-O-methyluridine-3'-phosphorothioate
  modified_base 23: mod_base = OTHER; note = 2'-O-methylcytidine
  misc_feature 1..4: note = RNA
  misc_feature 6..23: note = RNA
  misc_feature 5: note = DNA
atgctcatgtatccacctttgtc

SEQ ID NO: 998 - DNA, 23 bp, synthetic construct
  source 1..23: mol_type = other DNA
  modified_base 1: mod_base = OTHER; note = 2'-O-methyladenosine-3'-phosphorothioate
  modified_base 2: mod_base = OTHER; note = 2'-deoxy-2'-fluorocytidine-3'-phosphorothioate
  modified_base 3: mod_base = OTHER; note = 2'-O-methyluridine-3'-phosphate
  modified_base 4: mod_base = OTHER; note = 2'-O-methyluridine-3'-phosphate
  modified_base 6: mod_base = OTHER; note = 2'-O-methylcytidine-3'-phosphate
  modified_base 7: mod_base = OTHER; note = Thymidine-glycol nucleic acid (GNA), S-Isomer
  modified_base 8: mod_base = OTHER; note = 2'-O-methylcytidine-3'-phosphate
  modified_base 9: mod_base = OTHER; note = 2'-O-methyladenosine-3'-phosphate
  modified_base 10: mod_base = OTHER; note = 2'-O-methyluridine-3'-phosphate
  modified_base 11: mod_base = OTHER; note = 2'-O-methylguanosine-3'-phosphate
  modified_base 12: mod_base = OTHER; note = 2'-O-methyluridine-3'-phosphate
  modified_base 13: mod_base = OTHER; note = 2'-O-methyladenosine-3'-phosphate
  modified_base 14: mod_base = OTHER; note = 2'-deoxy-2'-fluorouridine-3'-phosphate
  modified_base 15: mod_base = OTHER; note = 2'-O-methylcytidine-3'-phosphate
  modified_base 16: mod_base = OTHER; note = 2'-deoxy-2'-fluorocytidine-3'-phosphate
  modified_base 17: mod_base = OTHER; note = 2'-O-methyladenosine-3'-phosphate
  modified_base 18: mod_base = OTHER; note = 2'-O-methylcytidine-3'-phosphate
  modified_base 19: mod_base = OTHER; note = 2'-O-methylcytidine-3'-phosphate
  modified_base 20: mod_base = OTHER; note = 2'-O-methyluridine-3'-phosphate
  modified_base 21: mod_base = OTHER; note = 2'-O-methyluridine-3'-phosphorothioate
  modified_base 22: mod_base = OTHER; note = 2'-O-methyluridine-3'-phosphorothioate
  modified_base 23: mod_base = OTHER; note = 2'-O-methylguanosine
  misc_feature 1..4: note = RNA
  misc_feature 6..23: note = RNA
  misc_feature 5: note = DNA
acttgctcatgtatccacctttg

SEQ ID NO: 999 - RNA, 23 nt, synthetic construct
  source 1..23: mol_type = other RNA
  modified_base 1: mod_base = OTHER; note = 2'-O-methyladenosine-3'-phosphorothioate
  modified_base 2: mod_base = OTHER; note = 2'-deoxy-2'-fluorocytidine-3'-phosphorothioate
  modified_base 3: mod_base = OTHER; note = 2'-O-methyladenosine-3'-phosphate
  modified_base 4: mod_base = OTHER; note = 2'-O-methyladenosine-3'-phosphate
  modified_base 5: mod_base = OTHER; note = 2'-O-methyladenosine-3'-phosphate
  modified_base 6: mod_base = OTHER; note = 2'-deoxy-2'-fluorouridine-3'-phosphate
  modified_base 7: mod_base = OTHER; note = 2'-O-methylcytidine-3'-phosphate
  modified_base 8: mod_base = OTHER; note = 2'-O-methyluridine-3'-phosphate
  modified_base 9: mod_base = OTHER; note = 2'-O-methyluridine-3'-phosphate
  modified_base 10: mod_base = OTHER; note = 2'-O-methylguanosine-3'-phosphate
  modified_base 11: mod_base = OTHER; note = 2'-O-methylcytidine-3'-phosphate
  modified_base 12: mod_base = OTHER; note = 2'-O-methyluridine-3'-phosphate
  modified_base 13: mod_base = OTHER; note = 2'-O-methylcytidine-3'-phosphate
  modified_base 14: mod_base = OTHER; note = 2'-deoxy-2'-fluoroadenosine-3'-phosphate
  modified_base 15: mod_base = OTHER; note = 2'-O-methyluridine-3'-phosphate
  modified_base 16: mod_base = OTHER; note = 2'-deoxy-2'-fluoroguanosine-3'-phosphate
  modified_base 17: mod_base = OTHER; note = 2'-O-methyluridine-3'-phosphate
  modified_base 18: mod_base = OTHER; note = 2'-O-methyladenosine-3'-phosphate
  modified_base 19: mod_base = OTHER; note = 2'-O-methyluridine-3'-phosphate
  modified_base 20: mod_base = OTHER; note = 2'-O-methylcytidine-3'-phosphate
  modified_base 21: mod_base = OTHER; note = 2'-O-methylcytidine-3'-phosphorothioate
  modified_base 22: mod_base = OTHER; note = 2'-O-methyladenosine-3'-phosphorothioate
  modified_base 23: mod_base = OTHER; note = 2'-O-methylcytidine
acaaatcttgctcatgtatccac

SEQ ID NO: 1000 - RNA, 23 nt, synthetic construct
  source 1..23: mol_type = other RNA
  modified_base 1: mod_base = OTHER; note = 2'-O-methyladenosine-3'-phosphorothioate
  modified_base 2: mod_base = OTHER; note = 2'-deoxy-2'-fluoroguanosine-3'-phosphorothioate
  modified_base 3: mod_base = OTHER; note = 2'-O-methylcytidine-3'-phosphate
  modified_base 4: mod_base = OTHER; note = 2'-O-methyladenosine-3'-phosphate
  modified_base 5: mod_base = OTHER; note = 2'-O-methyladenosine-3'-phosphate
  modified_base 6: mod_base = OTHER; note = 2'-deoxy-2'-fluoroadenosine-3'-phosphate
  modified_base 7: mod_base = OTHER; note = 2'-O-methyluridine-3'-phosphate
  modified_base 8: mod_base = OTHER; note = 2'-O-methylcytidine-3'-phosphate
  modified_base 9: mod_base = OTHER; note = 2'-O-methyluridine-3'-phosphate
  modified_base 10: mod_base = OTHER; note = 2'-O-methyluridine-3'-phosphate
  modified_base 11: mod_base = OTHER; note = 2'-O-methylguanosine-3'-phosphate
  modified_base 12: mod_base = OTHER; note = 2'-O-methylcytidine-3'-phosphate
  modified_base 13: mod_base = OTHER; note = 2'-O-methyluridine-3'-phosphate
  modified_base 14: mod_base = OTHER; note = 2'-deoxy-2'-fluorocytidine-3'-phosphate
  modified_base 15: mod_base = OTHER; note = 2'-O-methyladenosine-3'-phosphate
  modified_base 16: mod_base = OTHER; note = 2'-deoxy-2'-fluorouridine-3'-phosphate
  modified_base 17: mod_base = OTHER; note = 2'-O-methylguanosine-3'-phosphate
  modified_base 18: mod_base = OTHER; note = 2'-O-methyluridine-3'-phosphate
  modified_base 19: mod_base = OTHER; note = 2'-O-methyladenosine-3'-phosphate
  modified_base 20: mod_base = OTHER; note = 2'-O-methyluridine-3'-phosphate
  modified_base 21: mod_base = OTHER; note = 2'-O-methylcytidine-3'-phosphorothioate
  modified_base 22: mod_base = OTHER; note = 2'-O-methylcytidine-3'-phosphorothioate
  modified_base 23: mod_base = OTHER; note = 2'-O-methyladenosine
agcaaatcttgctcatgtatcca

SEQ ID NO: 1001 - RNA, 23 nt, synthetic construct
  source 1..23: mol_type = other RNA
  modified_base 1: mod_base = OTHER; note = 2'-O-methyladenosine-3'-phosphorothioate
  modified_base 2: mod_base = OTHER; note = 2'-deoxy-2'-fluorouridine-3'-phosphorothioate
  modified_base 3: mod_base = OTHER; note = 2'-O-methylguanosine-3'-phosphate
  modified_base 4: mod_base = OTHER; note = 2'-O-methylcytidine-3'-phosphate
  modified_base 5: mod_base = OTHER; note = 2'-O-methyladenosine-3'-phosphate
  modified_base 6: mod_base = OTHER; note = 2'-deoxy-2'-fluoroadenosine-3'-phosphate
  modified_base 7: mod_base = OTHER; note = 2'-O-methyladenosine-3'-phosphate
  modified_base 8: mod_base = OTHER; note = 2'-O-methyluridine-3'-phosphate
  modified_base 9: mod_base = OTHER; note = 2'-O-methylcytidine-3'-phosphate
  modified_base 10: mod_base = OTHER; note = 2'-O-methyluridine-3'-phosphate
  modified_base 11: mod_base = OTHER; note = 2'-O-methyluridine-3'-phosphate
  modified_base 12: mod_base = OTHER; note = 2'-O-methylguanosine-3'-phosphate
  modified_base 13: mod_base = OTHER; note = 2'-O-methylcytidine-3'-phosphate
  modified_base 14: mod_base = OTHER; note = 2'-deoxy-2'-fluorouridine-3'-phosphate
  modified_base 15: mod_base = OTHER; note = 2'-O-methylcytidine-3'-phosphate
  modified_base 16: mod_base = OTHER; note = 2'-deoxy-2'-fluoroadenosine-3'-phosphate
  modified_base 17: mod_base = OTHER; note = 2'-O-methyluridine-3'-phosphate
  modified_base 18: mod_base = OTHER; note = 2'-O-methylguanosine-3'-phosphate
  modified_base 19: mod_base = OTHER; note = 2'-O-methyluridine-3'-phosphate
  modified_base 20: mod_base = OTHER; note = 2'-O-methyladenosine-3'-phosphate
  modified_base 21: mod_base = OTHER; note = 2'-O-methyluridine-3'-phosphorothioate
  modified_base 22: mod_base = OTHER; note = 2'-O-methylcytidine-3'-phosphorothioate
  modified_base 23: mod_base = OTHER; note = 2'-O-methylcytidine
atgcaaatcttgctcatgtatcc

SEQ ID NO: 1002 - RNA, 23 nt, synthetic construct
  source 1..23: mol_type = other RNA
  modified_base 1: mod_base = OTHER; note = 2'-O-methyladenosine-3'-phosphorothioate
  modified_base 2: mod_base = OTHER; note = 2'-deoxy-2'-fluorouridine-3'-phosphorothioate
  modified_base 3: mod_base = OTHER; note = 2'-O-methyluridine-3'-phosphate
  modified_base 4: mod_base = OTHER; note = 2'-O-methylguanosine-3'-phosphate
  modified_base 5: mod_base = OTHER; note = 2'-O-methylcytidine-3'-phosphate
  modified_base 6: mod_base = OTHER; note = 2'-deoxy-2'-fluoroadenosine-3'-phosphate
  modified_base 7: mod_base = OTHER; note = 2'-O-methyladenosine-3'-phosphate
  modified_base 8: mod_base = OTHER; note = 2'-O-methyladenosine-3'-phosphate
  modified_base 9: mod_base = OTHER; note = 2'-O-methyluridine-3'-phosphate
  modified_base 10: mod_base = OTHER; note = 2'-O-methylcytidine-3'-phosphate
  modified_base 11: mod_base = OTHER; note = 2'-O-methyluridine-3'-phosphate
  modified_base 12: mod_base = OTHER; note = 2'-O-methyluridine-3'-phosphate
  modified_base 13: mod_base = OTHER; note = 2'-O-methylguanosine-3'-phosphate
  modified_base 14: mod_base = OTHER; note = 2'-deoxy-2'-fluorocytidine-3'-phosphate
  modified_base 15: mod_base = OTHER; note = 2'-O-methyluridine-3'-phosphate
  modified_base 16: mod_base = OTHER; note = 2'-deoxy-2'-fluorocytidine-3'-phosphate
  modified_base 17: mod_base = OTHER; note = 2'-O-methyladenosine-3'-phosphate
  modified_base 18: mod_base = OTHER; note = 2'-O-methyluridine-3'-phosphate
  modified_base 19: mod_base = OTHER; note = 2'-O-methylguanosine-3'-phosphate
  modified_base 20: mod_base = OTHER; note = 2'-O-methyluridine-3'-phosphate
  modified_base 21: mod_base = OTHER; note = 2'-O-methyladenosine-3'-phosphorothioate
  modified_base 22: mod_base = OTHER; note = 2'-O-methyluridine-3'-phosphorothioate
  modified_base 23: mod_base = OTHER; note = 2'-O-methylcytidine
attgcaaatcttgctcatgtatc

SEQ ID NO: 1003 - DNA, 23 bp, synthetic construct
  source 1..23: mol_type = other DNA
  modified_base 1: mod_base = OTHER; note = 2'-O-methyladenosine-3'-phosphorothioate
  modified_base 2: mod_base = OTHER; note = 2'-deoxy-2'-fluoroguanosine-3'-phosphorothioate
  modified_base 3: mod_base = OTHER; note = 2'-O-methyluridine-3'-phosphate
  modified_base 4: mod_base = OTHER; note = 2'-O-methyluridine-3'-phosphate
  modified_base 6: mod_base = OTHER; note = 2'-O-methylcytidine-3'-phosphate
  modified_base 7: mod_base = OTHER; note = Adenosine-glycol nucleic acid (GNA), S-isomer
  modified_base 8: mod_base = OTHER; note = 2'-O-methyladenosine-3'-phosphate
  modified_base 9: mod_base = OTHER; note = 2'-O-methyladenosine-3'-phosphate
  modified_base 10: mod_base = OTHER; note = 2'-O-methyluridine-3'-phosphate
  modified_base 11: mod_base = OTHER; note = 2'-O-methylcytidine-3'-phosphate
  modified_base 12: mod_base = OTHER; note = 2'-O-methyluridine-3'-phosphate
  modified_base 13: mod_base = OTHER; note = 2'-O-methyluridine-3'-phosphate
  modified_base 14: mod_base = OTHER; note = 2'-deoxy-2'-fluoroguanosine-3'-phosphate
  modified_base 15: mod_base = OTHER; note = 2'-O-methylcytidine-3'-phosphate
  modified_base 16: mod_base = OTHER; note = 2'-deoxy-2'-fluorouridine-3'-phosphate
  modified_base 17: mod_base = OTHER; note = 2'-O-methylcytidine-3'-phosphate
  modified_base 18: mod_base = OTHER; note = 2'-O-methyladenosine-3'-phosphate
  modified_base 19: mod_base = OTHER; note = 2'-O-methyluridine-3'-phosphate
  modified_base 20: mod_base = OTHER; note = 2'-O-methylguanosine-3'-phosphate
  modified_base 21: mod_base = OTHER; note = 2'-O-methyluridine-3'-phosphorothioate
  modified_base 22: mod_base = OTHER; note = 2'-O-methyladenosine-3'-phosphorothioate
  modified_base 23: mod_base = OTHER; note = 2'-O-methyluridine
  misc_feature 1..4: note = RNA
  misc_feature 6..23: note = RNA
  misc_feature 5: note = DNA
agttgcaaatcttgctcatgtat

SEQ ID NO: 1004 - RNA, 23 nt, synthetic construct
  source 1..23: mol_type = other RNA
  modified_base 1: mod_base = OTHER; note = 2'-O-methyladenosine-3'-phosphorothioate
  modified_base 2: mod_base = OTHER; note = 2'-deoxy-2'-fluorocytidine-3'-phosphorothioate
  modified_base 3: mod_base = OTHER; note = 2'-O-methyladenosine-3'-phosphate
  modified_base 4: mod_base = OTHER; note = 2'-O-methyladenosine-3'-phosphate
  modified_base 5: mod_base = OTHER; note = 2'-O-methylguanosine-3'-phosphate
  modified_base 6: mod_base = OTHER; note = 2'-deoxy-2'-fluorouridine-3'-phosphate
  modified_base 7: mod_base = OTHER; note = 2'-O-methyluridine-3'-phosphate
  modified_base 8: mod_base = OTHER; note = 2'-O-methylguanosine-3'-phosphate
  modified_base 9: mod_base = OTHER; note = 2'-O-methylcytidine-3'-phosphate
  modified_base 10: mod_base = OTHER; note = 2'-O-methyladenosine-3'-phosphate
  modified_base 11: mod_base = OTHER; note = 2'-O-methyladenosine-3'-phosphate
  modified_base 12: mod_base = OTHER; note = 2'-O-methyladenosine-3'-phosphate
  modified_base 13: mod_base = OTHER; note = 2'-O-methyluridine-3'-phosphate
  modified_base 14: mod_base = OTHER; note = 2'-deoxy-2'-fluorocytidine-3'-phosphate
  modified_base 15: mod_base = OTHER; note = 2'-O-methyluridine-3'-phosphate
  modified_base 16: mod_base = OTHER; note = 2'-deoxy-2'-fluorouridine-3'-phosphate
  modified_base 17: mod_base = OTHER; note = 2'-O-methylguanosine-3'-phosphate
  modified_base 18: mod_base = OTHER; note = 2'-O-methylcytidine-3'-phosphate
  modified_base 19: mod_base = OTHER; note = 2'-O-methyluridine-3'-phosphate
  modified_base 20: mod_base = OTHER; note = 2'-O-methylcytidine-3'-phosphate
  modified_base 21: mod_base = OTHER; note = 2'-O-methyladenosine-3'-phosphorothioate
  modified_base 22: mod_base = OTHER; note = 2'-O-methyluridine-3'-phosphorothioate
  modified_base 23: mod_base = OTHER; note = 2'-O-methylguanosine
acaagttgcaaatcttgctcatg

SEQ ID NO: 1005 - DNA, 23 bp, synthetic construct
  source 1..23: mol_type = other DNA
  modified_base 1: mod_base = OTHER; note = 2'-O-methyladenosine-3'-phosphorothioate
  modified_base 2: mod_base = OTHER; note = 2'-deoxy-2'-fluoroguanosine-3'-phosphorothioate
  modified_base 3: mod_base = OTHER; note = 2'-O-methylcytidine-3'-phosphate
  modified_base 4: mod_base = OTHER; note = 2'-O-methyladenosine-3'-phosphate
  modified_base 6: mod_base = OTHER; note = 2'-O-methylguanosine-3'-phosphate
  modified_base 7: mod_base = OTHER; note = Thymidine-glycol nucleic acid (GNA), S-Isomer
  modified_base 8: mod_base = OTHER; note = 2'-O-methyluridine-3'-phosphate
  modified_base 9: mod_base = OTHER; note = 2'-O-methylguanosine-3'-phosphate
  modified_base 10: mod_base = OTHER; note = 2'-O-methylcytidine-3'-phosphate
  modified_base 11: mod_base = OTHER; note = 2'-O-methyladenosine-3'-phosphate
  modified_base 12: mod_base = OTHER; note = 2'-O-methyladenosine-3'-phosphate
  modified_base 13: mod_base = OTHER; note = 2'-O-methyladenosine-3'-phosphate
  modified_base 14: mod_base = OTHER; note = 2'-deoxy-2'-fluorouridine-3'-phosphate
  modified_base 15: mod_base = OTHER; note = 2'-O-methylcytidine-3'-phosphate
  modified_base 16: mod_base = OTHER; note = 2'-deoxy-2'-fluorouridine-3'-phosphate
  modified_base 17: mod_base = OTHER; note = 2'-O-methyluridine-3'-phosphate
  modified_base 18: mod_base = OTHER; note = 2'-O-methylguanosine-3'-phosphate
  modified_base 19: mod_base = OTHER; note = 2'-O-methylcytidine-3'-phosphate
  modified_base 20: mod_base = OTHER; note = 2'-O-methyluridine-3'-phosphate
  modified_base 21: mod_base = OTHER; note = 2'-O-methylcytidine-3'-phosphorothioate
  modified_base 22: mod_base = OTHER; note = 2'-O-methyladenosine-3'-phosphorothioate
  modified_base 23: mod_base = OTHER; note = 2'-O-methyluridine
  misc_feature 1..4: note = RNA
  misc_feature 6..23: note = RNA
  misc_feature 5: note = DNA
agcaagttgcaaatcttgctcat

SEQ ID NO: 1006 - RNA, 23 nt, synthetic construct
  source 1..23: mol_type = other RNA
  modified_base 1: mod_base = OTHER; note = 2'-O-methyladenosine-3'-phosphorothioate
  modified_base 2: mod_base = OTHER; note = 2'-deoxy-2'-fluoroadenosine-3'-phosphorothioate
  modified_base 3: mod_base = OTHER; note = 2'-O-methylguanosine-3'-phosphate
  modified_base 4: mod_base = OTHER; note = 2'-O-methylcytidine-3'-phosphate
  modified_base 5: mod_base = OTHER; note = 2'-O-methyladenosine-3'-phosphate
  modified_base 6: mod_base = OTHER; note = 2'-deoxy-2'-fluoroadenosine-3'-phosphate
  modified_base 7: mod_base = OTHER; note = 2'-O-methylguanosine-3'-phosphate
  modified_base 8: mod_base = OTHER; note = 2'-O-methyluridine-3'-phosphate
  modified_base 9: mod_base = OTHER; note = 2'-O-methyluridine-3'-phosphate
  modified_base 10: mod_base = OTHER; note = 2'-O-methylguanosine-3'-phosphate
  modified_base 11: mod_base = OTHER; note = 2'-O-methylcytidine-3'-phosphate
  modified_base 12: mod_base = OTHER; note = 2'-O-methyladenosine-3'-phosphate
  modified_base 13: mod_base = OTHER; note = 2'-O-methyladenosine-3'-phosphate
  modified_base 14: mod_base = OTHER; note = 2'-deoxy-2'-fluoroadenosine-3'-phosphate
  modified_base 15: mod_base = OTHER; note = 2'-O-methyluridine-3'-phosphate
  modified_base 16: mod_base = OTHER; note = 2'-deoxy-2'-fluorocytidine-3'-phosphate
  modified_base 17: mod_base = OTHER; note = 2'-O-methyluridine-3'-phosphate
  modified_base 18: mod_base = OTHER; note = 2'-O-methyluridine-3'-phosphate
  modified_base 19: mod_base = OTHER; note = 2'-O-methylguanosine-3'-phosphate
  modified_base 20: mod_base = OTHER; note = 2'-O-methylcytidine-3'-phosphate
  modified_base 21: mod_base = OTHER; note = 2'-O-methyluridine-3'-phosphorothioate
  modified_base 22: mod_base = OTHER; note = 2'-O-methylcytidine-3'-phosphorothioate
  modified_base 23: mod_base = OTHER; note = 2'-O-methyladenosine
aagcaagttgcaaatcttgctca

SEQ ID NO: 1007 - RNA, 23 nt, synthetic construct
  source 1..23: mol_type = other RNA
  modified_base 1: mod_base = OTHER; note = 2'-O-methyladenosine-3'-phosphorothioate
  modified_base 2: mod_base = OTHER; note = 2'-deoxy-2'-fluorouridine-3'-phosphorothioate
  modified_base 3: mod_base = OTHER; note = 2'-O-methyladenosine-3'-phosphate
  modified_base 4: mod_base = OTHER; note = 2'-O-methylguanosine-3'-phosphate
  modified_base 5: mod_base = OTHER; note = 2'-O-methylcytidine-3'-phosphate
  modified_base 6: mod_base = OTHER; note = 2'-deoxy-2'-fluoroadenosine-3'-phosphate
  modified_base 7: mod_base = OTHER; note = 2'-O-methyladenosine-3'-phosphate
  modified_base 8: mod_base = OTHER; note = 2'-O-methylguanosine-3'-phosphate
  modified_base 9: mod_base = OTHER; note = 2'-O-methyluridine-3'-phosphate
  modified_base 10: mod_base = OTHER; note = 2'-O-methyluridine-3'-phosphate
  modified_base 11: mod_base = OTHER; note = 2'-O-methylguanosine-3'-phosphate
  modified_base 12: mod_base = OTHER; note = 2'-O-methylcytidine-3'-phosphate
  modified_base 13: mod_base = OTHER; note = 2'-O-methyladenosine-3'-phosphate
  modified_base 14: mod_base = OTHER; note = 2'-deoxy-2'-fluoroadenosine-3'-phosphate
  modified_base 15: mod_base = OTHER; note = 2'-O-methyladenosine-3'-phosphate
  modified_base 16: mod_base = OTHER; note = 2'-deoxy-2'-fluorouridine-3'-phosphate
  modified_base 17: mod_base = OTHER; note = 2'-O-methylcytidine-3'-phosphate
  modified_base 18: mod_base = OTHER; note = 2'-O-methyluridine-3'-phosphate
  modified_base 19: mod_base = OTHER; note = 2'-O-methyluridine-3'-phosphate
  modified_base 20: mod_base = OTHER; note = 2'-O-methylguanosine-3'-phosphate
  modified_base 21: mod_base = OTHER; note = 2'-O-methylcytidine-3'-phosphorothioate
  modified_base 22: mod_base = OTHER; note = 2'-O-methyluridine-3'-phosphorothioate
  modified_base 23: mod_base = OTHER; note = 2'-O-methylcytidine
atagcaagttgcaaatcttgctc

SEQ ID NO: 1008 - DNA, 23 bp, synthetic construct
  source 1..23: mol_type = other DNA
  modified_base 1: mod_base = OTHER; note = 2'-O-methyladenosine-3'-phosphorothioate
  modified_base 2: mod_base = OTHER; note = 2'-deoxy-2'-fluorouridine-3'-phosphorothioate
  modified_base 3: mod_base = OTHER; note = 2'-O-methyladenosine-3'-phosphate
  modified_base 4: mod_base = OTHER; note = 2'-O-methylguanosine-3'-phosphate
  modified_base 6: mod_base = OTHER; note = 2'-O-methyladenosine-3'-phosphate
  modified_base 7: mod_base = OTHER; note = Adenosine-glycol nucleic acid (GNA), S-isomer
  modified_base 8: mod_base = OTHER; note = 2'-O-methylguanosine-3'-phosphate
  modified_base 9: mod_base = OTHER; note = 2'-O-methyluridine-3'-phosphate
  modified_base 10: mod_base = OTHER; note = 2'-O-methyluridine-3'-phosphate
  modified_base 11: mod_base = OTHER; note = 2'-O-methylguanosine-3'-phosphate
  modified_base 12: mod_base = OTHER; note = 2'-O-methylcytidine-3'-phosphate
  modified_base 13: mod_base = OTHER; note = 2'-O-methyladenosine-3'-phosphate
  modified_base 14: mod_base = OTHER; note = 2'-deoxy-2'-fluoroadenosine-3'-phosphate
  modified_base 15: mod_base = OTHER; note = 2'-O-methyladenosine-3'-phosphate
  modified_base 16: mod_base = OTHER; note = 2'-deoxy-2'-fluorouridine-3'-phosphate
  modified_base 17: mod_base = OTHER; note = 2'-O-methylcytidine-3'-phosphate
  modified_base 18: mod_base = OTHER; note = 2'-O-methyluridine-3'-phosphate
  modified_base 19: mod_base = OTHER; note = 2'-O-methyluridine-3'-phosphate
  modified_base 20: mod_base = OTHER; note = 2'-O-methylguanosine-3'-phosphate
  modified_base 21: mod_base = OTHER; note = 2'-O-methylcytidine-3'-phosphorothioate
  modified_base 22: mod_base = OTHER; note = 2'-O-methyluridine-3'-phosphorothioate
  modified_base 23: mod_base = OTHER; note = 2'-O-methylcytidine
  misc_feature 1..4: note = RNA
  misc_feature 6..23: note = RNA
  misc_feature 5: note = DNA
atagcaagttgcaaatcttgctc

SEQ ID NO: 1009 - RNA, 23 nt, synthetic construct
  source 1..23: mol_type = other RNA
  modified_base 1: mod_base = OTHER; note = 2'-O-methyladenosine-3'-phosphorothioate
  modified_base 2: mod_base = OTHER; note = 2'-deoxy-2'-fluorocytidine-3'-phosphorothioate
  modified_base 3: mod_base = OTHER; note = 2'-O-methyluridine-3'-phosphate
  modified_base 4: mod_base = OTHER; note = 2'-O-methyladenosine-3'-phosphate
  modified_base 5: mod_base = OTHER; note = 2'-O-methyladenosine-3'-phosphate
  modified_base 6: mod_base = OTHER; note = 2'-deoxy-2'-fluorouridine-3'-phosphate
  modified_base 7: mod_base = OTHER; note = 2'-O-methylguanosine-3'-phosphate
  modified_base 8: mod_base = OTHER; note = 2'-O-methylguanosine-3'-phosphate
  modified_base 9: mod_base = OTHER; note = 2'-O-methylguanosine-3'-phosphate
  modified_base 10: mod_base = OTHER; note = 2'-O-methyluridine-3'-phosphate
  modified_base 11: mod_base = OTHER; note = 2'-O-methyladenosine-3'-phosphate
  modified_base 12: mod_base = OTHER; note = 2'-O-methylguanosine-3'-phosphate
  modified_base 13: mod_base = OTHER; note = 2'-O-methylcytidine-3'-phosphate
  modified_base 14: mod_base = OTHER; note = 2'-deoxy-2'-fluoroadenosine-3'-phosphate
  modified_base 15: mod_base = OTHER; note = 2'-O-methyladenosine-3'-phosphate
  modified_base 16: mod_base = OTHER; note = 2'-deoxy-2'-fluoroguanosine-3'-phosphate
  modified_base 17: mod_base = OTHER; note = 2'-O-methyluridine-3'-phosphate
  modified_base 18: mod_base = OTHER; note = 2'-O-methyluridine-3'-phosphate
  modified_base 19: mod_base = OTHER; note = 2'-O-methylguanosine-3'-phosphate
  modified_base 20: mod_base = OTHER; note = 2'-O-methylcytidine-3'-phosphate
  modified_base 21: mod_base = OTHER; note = 2'-O-methyladenosine-3'-phosphorothioate
  modified_base 22: mod_base = OTHER; note = 2'-O-methyladenosine-3'-phosphorothioate
  modified_base 23: mod_base = OTHER; note = 2'-O-methyladenosine
actaatgggtagcaagttgcaaa

SEQ ID NO: 1010 - RNA, 23 nt, synthetic construct
  source 1..23: mol_type = other RNA
  modified_base 1: mod_base = OTHER; note = 2'-O-methyladenosine-3'-phosphorothioate
  modified_base 2: mod_base = OTHER; note = 2'-deoxy-2'-fluorocytidine-3'-phosphorothioate
  modified_base 3: mod_base = OTHER; note = 2'-O-methylcytidine-3'-phosphate
  modified_base 4: mod_base = OTHER; note = 2'-O-methyluridine-3'-phosphate
  modified_base 5: mod_base = OTHER; note = 2'-O-methyladenosine-3'-phosphate
  modified_base 6: mod_base = OTHER; note = 2'-deoxy-2'-fluoroadenosine-3'-phosphate
  modified_base 7: mod_base = OTHER; note = 2'-O-methyluridine-3'-phosphate
  modified_base 8: mod_base = OTHER; note = 2'-O-methylguanosine-3'-phosphate
  modified_base 9: mod_base = OTHER; note = 2'-O-methylguanosine-3'-phosphate
  modified_base 10: mod_base = OTHER; note = 2'-O-methylguanosine-3'-phosphate
  modified_base 11: mod_base = OTHER; note = 2'-O-methyluridine-3'-phosphate
  modified_base 12: mod_base = OTHER; note = 2'-O-methyladenosine-3'-phosphate
  modified_base 13: mod_base = OTHER; note = 2'-O-methylguanosine-3'-phosphate
  modified_base 14: mod_base = OTHER; note = 2'-deoxy-2'-fluorocytidine-3'-phosphate
  modified_base 15: mod_base = OTHER; note = 2'-O-methyladenosine-3'-phosphate
  modified_base 16: mod_base = OTHER; note = 2'-deoxy-2'-fluoroadenosine-3'-phosphate
  modified_base 17: mod_base = OTHER; note = 2'-O-methylguanosine-3'-phosphate
  modified_base 18: mod_base = OTHER; note = 2'-O-methyluridine-3'-phosphate
  modified_base 19: mod_base = OTHER; note = 2'-O-methyluridine-3'-phosphate
  modified_base 20: mod_base = OTHER; note = 2'-O-methylguanosine-3'-phosphate
  modified_base 21: mod_base = OTHER; note = 2'-O-methylcytidine-3'-phosphorothioate
  modified_base 22: mod_base = OTHER; note = 2'-O-methyladenosine-3'-phosphorothioate
  modified_base 23: mod_base = OTHER; note = 2'-O-methyladenosine
acctaatgggtagcaagttgcaa

SEQ ID NO: 1011 - RNA, 23 nt, synthetic construct
  source 1..23: mol_type = other RNA
  modified_base 1: mod_base = OTHER; note = 2'-O-methyladenosine-3'-phosphorothioate
  modified_base 2: mod_base = OTHER; note = 2'-deoxy-2'-fluorouridine-3'-phosphorothioate
  modified_base 3: mod_base = OTHER; note = 2'-O-methylcytidine-3'-phosphate
  modified_base 4: mod_base = OTHER; note = 2'-O-methylcytidine-3'-phosphate
  modified_base 5: mod_base = OTHER; note = 2'-O-methyluridine-3'-phosphate
  modified_base 6: mod_base = OTHER; note = 2'-deoxy-2'-fluoroadenosine-3'-phosphate
  modified_base 7: mod_base = OTHER; note = 2'-O-methyladenosine-3'-phosphate
  modified_base 8: mod_base = OTHER; note = 2'-O-methyluridine-3'-phosphate
  modified_base 9: mod_base = OTHER; note = 2'-O-methylguanosine-3'-phosphate
  modified_base 10: mod_base = OTHER; note = 2'-O-methylguanosine-3'-phosphate
  modified_base 11: mod_base = OTHER; note = 2'-O-methylguanosine-3'-phosphate
  modified_base 12: mod_base = OTHER; note = 2'-O-methyluridine-3'-phosphate
  modified_base 13: mod_base = OTHER; note = 2'-O-methyladenosine-3'-phosphate
  modified_base 14: mod_base = OTHER; note = 2'-deoxy-2'-fluoroguanosine-3'-phosphate
  modified_base 15: mod_base = OTHER; note = 2'-O-methylcytidine-3'-phosphate
  modified_base 16: mod_base = OTHER; note = 2'-deoxy-2'-fluoroadenosine-3'-phosphate
  modified_base 17: mod_base = OTHER; note = 2'-O-methyladenosine-3'-phosphate
  modified_base 18: mod_base = OTHER; note = 2'-O-methylguanosine-3'-phosphate
  modified_base 19: mod_base = OTHER; note = 2'-O-methyluridine-3'-phosphate
  modified_base 20: mod_base = OTHER; note = 2'-O-methyluridine-3'-phosphate
  modified_base 21: mod_base = OTHER; note = 2'-O-methylguanosine-3'-phosphorothioate
  modified_base 22: mod_base = OTHER; note = 2'-O-methylcytidine-3'-phosphorothioate
  modified_base 23: mod_base = OTHER; note = 2'-O-methyladenosine
atcctaatgggtagcaagttgca

SEQ ID NO: 1012 - RNA, 23 nt, synthetic construct
  source 1..23: mol_type = other RNA
  modified_base 1: mod_base = OTHER; note = 2'-O-methyladenosine-3'-phosphorothioate
  modified_base 2: mod_base = OTHER; note = 2'-deoxy-2'-fluoroadenosine-3'-phosphorothioate
  modified_base 3: mod_base = OTHER; note = 2'-O-methyluridine-3'-phosphate
  modified_base 4: mod_base = OTHER; note = 2'-O-methylcytidine-3'-phosphate
  modified_base 5: mod_base = OTHER; note = 2'-O-methylcytidine-3'-phosphate
  modified_base 6: mod_base = OTHER; note = 2'-deoxy-2'-fluorouridine-3'-phosphate
  modified_base 7: mod_base = OTHER; note = 2'-O-methyladenosine-3'-phosphate
  modified_base 8: mod_base = OTHER; note = 2'-O-methyladenosine-3'-phosphate
  modified_base 9: mod_base = OTHER; note = 2'-O-methyluridine-3'-phosphate
  modified_base 10: mod_base = OTHER; note = 2'-O-methylguanosine-3'-phosphate
  modified_base 11: mod_base = OTHER; note = 2'-O-methylguanosine-3'-phosphate
  modified_base 12: mod_base = OTHER; note = 2'-O-methylguanosine-3'-phosphate
  modified_base 13: mod_base = OTHER; note = 2'-O-methyluridine-3'-phosphate
  modified_base 14: mod_base = OTHER; note = 2'-deoxy-2'-fluoroadenosine-3'-phosphate
  modified_base 15: mod_base = OTHER; note = 2'-O-methylguanosine-3'-phosphate
  modified_base 16: mod_base = OTHER; note = 2'-deoxy-2'-fluorocytidine-3'-phosphate
  modified_base 17: mod_base = OTHER; note = 2'-O-methyladenosine-3'-phosphate
  modified_base 18: mod_base = OTHER; note = 2'-O-methyladenosine-3'-phosphate
  modified_base 19: mod_base = OTHER; note = 2'-O-methylguanosine-3'-phosphate
  modified_base 20: mod_base = OTHER; note = 2'-O-methyluridine-3'-phosphate
  modified_base 21: mod_base = OTHER; note = 2'-O-methyluridine-3'-phosphorothioate
  modified_base 22: mod_base = OTHER; note = 2'-O-methylguanosine-3'-phosphorothioate
  modified_base 23: mod_base = OTHER; note = 2'-O-methylcytidine
aatcctaatgggtagcaagttgc

SEQ ID NO: 1013 - DNA, 23 bp, synthetic construct
  source 1..23: mol_type = other DNA
  modified_base 1: mod_base = OTHER; note = 2'-O-methyladenosine-3'-phosphorothioate
  modified_base 2: mod_base = OTHER; note = 2'-deoxy-2'-fluorouridine-3'-phosphorothioate
  modified_base 3: mod_base = OTHER; note = 2'-O-methyladenosine-3'-phosphate
  modified_base 4: mod_base = OTHER; note = 2'-O-methyluridine-3'-phosphate
  modified_base 6: mod_base = OTHER; note = 2'-O-methylcytidine-3'-phosphate
  modified_base 7: mod_base = OTHER; note = Thymidine-glycol nucleic acid (GNA), S-Isomer
  modified_base 8: mod_base = OTHER; note = 2'-O-methyladenosine-3'-phosphate
  modified_base 9: mod_base = OTHER; note = 2'-O-methyladenosine-3'-phosphate
  modified_base 10: mod_base = OTHER; note = 2'-O-methyluridine-3'-phosphate
  modified_base 11: mod_base = OTHER; note = 2'-O-methylguanosine-3'-phosphate
  modified_base 12: mod_base = OTHER; note = 2'-O-methylguanosine-3'-phosphate
  modified_base 13: mod_base = OTHER; note = 2'-O-methylguanosine-3'-phosphate
  modified_base 14: mod_base = OTHER; note = 2'-deoxy-2'-fluorouridine-3'-phosphate
  modified_base 15: mod_base = OTHER; note = 2'-O-methyladenosine-3'-phosphate
  modified_base 16: mod_base = OTHER; note = 2'-deoxy-2'-fluoroguanosine-3'-phosphate
  modified_base 17: mod_base = OTHER; note = 2'-O-methylcytidine-3'-phosphate
  modified_base 18: mod_base = OTHER; note = 2'-O-methyladenosine-3'-phosphate
  modified_base 19: mod_base = OTHER; note = 2'-O-methyladenosine-3'-phosphate
  modified_base 20: mod_base = OTHER; note = 2'-O-methylguanosine-3'-phosphate
  modified_base 21: mod_base = OTHER; note = 2'-O-methyluridine-3'-phosphorothioate
  modified_base 22: mod_base = OTHER; note = 2'-O-methyluridine-3'-phosphorothioate
  modified_base 23: mod_base = OTHER; note = 2'-O-methylguanosine
  misc_feature 1..4: note = RNA
  misc_feature 6..23: note = RNA
  misc_feature 5: note = DNA
atatcctaatgggtagcaagttg

SEQ ID NO: 1014 - RNA, 23 nt, synthetic construct
  source 1..23: mol_type = other RNA
  modified_base 1: mod_base = OTHER; note = 2'-O-methyladenosine-3'-phosphorothioate
  modified_base 2: mod_base = OTHER; note = 2'-deoxy-2'-fluorocytidine-3'-phosphorothioate
  modified_base 3: mod_base = OTHER; note = 2'-O-methyladenosine-3'-phosphate
  modified_base 4: mod_base = OTHER; note = 2'-O-methylguanosine-3'-phosphate
  modified_base 5: mod_base = OTHER; note = 2'-O-methylguanosine-3'-phosphate
  modified_base 6: mod_base = OTHER; note = 2'-deoxy-2'-fluorocytidine-3'-phosphate
  modified_base 7: mod_base = OTHER; note = 2'-O-methyladenosine-3'-phosphate
  modified_base 8: mod_base = OTHER; note = 2'-O-methylguanosine-3'-phosphate
  modified_base 9: mod_base = OTHER; note = 2'-O-methylguanosine-3'-phosphate
  modified_base 10: mod_base = OTHER; note = 2'-O-methylguanosine-3'-phosphate
  modified_base 11: mod_base = OTHER; note = 2'-O-methyluridine-3'-phosphate
  modified_base 12: mod_base = OTHER; note = 2'-O-methyladenosine-3'-phosphate
  modified_base 13: mod_base = OTHER; note = 2'-O-methylcytidine-3'-phosphate
  modified_base 14: mod_base = OTHER; note = 2'-deoxy-2'-fluoroadenosine-3'-phosphate
  modified_base 15: mod_base = OTHER; note = 2'-O-methylguanosine-3'-phosphate
  modified_base 16: mod_base = OTHER; note = 2'-deoxy-2'-fluoroguanosine-3'-phosphate
  modified_base 17: mod_base = OTHER; note = 2'-O-methylguanosine-3'-phosphate
  modified_base 18: mod_base = OTHER; note = 2'-O-methylcytidine-3'-phosphate
  modified_base 19: mod_base = OTHER; note = 2'-O-methyladenosine-3'-phosphate
  modified_base 20: mod_base = OTHER; note = 2'-O-methylguanosine-3'-phosphate
  modified_base 21: mod_base = OTHER; note = 2'-O-methylcytidine-3'-phosphorothioate
  modified_base 22: mod_base = OTHER; note = 2'-O-methyladenosine-3'-phosphorothioate
  modified_base 23: mod_base = OTHER; note = 2'-O-methyluridine
acaggcagggtacagggcagcat

SEQ ID NO: 1015 - DNA, 23 bp, synthetic construct
  source 1..23: mol_type = other DNA
  modified_base 1: mod_base = OTHER; note = 2'-O-methyladenosine-3'-phosphorothioate
  modified_base 2: mod_base = OTHER; note = 2'-deoxy-2'-fluorouridine-3'-phosphorothioate
  modified_base 3: mod_base = OTHER; note = 2'-O-methylcytidine-3'-phosphate
  modified_base 4: mod_base = OTHER; note = 2'-O-methylcytidine-3'-phosphate
  modified_base 6: mod_base = OTHER; note = 2'-O-methylcytidine-3'-phosphate
  modified_base 7: mod_base = OTHER; note = Adenosine-glycol nucleic acid (GNA), S-isomer
  modified_base 8: mod_base = OTHER; note = 2'-O-methylguanosine-3'-phosphate
  modified_base 9: mod_base = OTHER; note = 2'-O-methylguanosine-3'-phosphate
  modified_base 10: mod_base = OTHER; note = 2'-O-methylcytidine-3'-phosphate
  modified_base 11: mod_base = OTHER; note = 2'-O-methyladenosine-3'-phosphate
  modified_base 12: mod_base = OTHER; note = 2'-O-methylguanosine-3'-phosphate
  modified_base 13: mod_base = OTHER; note = 2'-O-methylguanosine-3'-phosphate
  modified_base 14: mod_base = OTHER; note = 2'-deoxy-2'-fluoroguanosine-3'-phosphate
  modified_base 15: mod_base = OTHER; note = 2'-O-methyluridine-3'-phosphate
  modified_base 16: mod_base = OTHER; note = 2'-deoxy-2'-fluoroadenosine-3'-phosphate
  modified_base 17: mod_base = OTHER; note = 2'-O-methylcytidine-3'-phosphate
  modified_base 18: mod_base = OTHER; note = 2'-O-methyladenosine-3'-phosphate
  modified_base 19: mod_base = OTHER; note = 2'-O-methylguanosine-3'-phosphate
  modified_base 20: mod_base = OTHER; note = 2'-O-methylguanosine-3'-phosphate
  modified_base 21: mod_base = OTHER; note = 2'-O-methylguanosine-3'-phosphorothioate
  modified_base 22: mod_base = OTHER; note = 2'-O-methylcytidine-3'-phosphorothioate
  modified_base 23: mod_base = OTHER; note = 2'-O-methyladenosine
  misc_feature 1..4: note = RNA
  misc_feature 6..23: note = RNA
  misc_feature 5: note = DNA
atccacaggcagggtacagggca

SEQ ID NO: 1016 - RNA, 23 nt, synthetic construct
  source 1..23: mol_type = other RNA
  modified_base 1: mod_base = OTHER; note = 2'-O-methyladenosine-3'-phosphorothioate
  modified_base 2: mod_base = OTHER; note = 2'-deoxy-2'-fluoroguanosine-3'-phosphorothioate
  modified_base 3: mod_base = OTHER; note = 2'-O-methyladenosine-3'-phosphate
  modified_base 4: mod_base = OTHER; note = 2'-O-methylcytidine-3'-phosphate
  modified_base 5: mod_base = OTHER; note = 2'-O-methyladenosine-3'-phosphate
  modified_base 6: mod_base = OTHER; note = 2'-deoxy-2'-fluoroadenosine-3'-phosphate
  modified_base 7: mod_base = OTHER; note = 2'-O-methyluridine-3'-phosphate
  modified_base 8: mod_base = OTHER; note = 2'-O-methylcytidine-3'-phosphate
  modified_base 9: mod_base = OTHER; note = 2'-O-methylguanosine-3'-phosphate
  modified_base 10: mod_base = OTHER; note = 2'-O-methylcytidine-3'-phosphate
  modified_base 11: mod_base = OTHER; note = 2'-O-methyladenosine-3'-phosphate
  modified_base 12: mod_base = OTHER; note = 2'-O-methyladenosine-3'-phosphate
  modified_base 13: mod_base = OTHER; note = 2'-O-methyluridine-3'-phosphate
  modified_base 14: mod_base = OTHER; note = 2'-deoxy-2'-fluoroguanosine-3'-phosphate
  modified_base 15: mod_base = OTHER; note = 2'-O-methylguanosine-3'-phosphate
  modified_base 16: mod_base = OTHER; note = 2'-deoxy-2'-fluorocytidine-3'-phosphate
  modified_base 17: mod_base = OTHER; note = 2'-O-methyladenosine-3'-phosphate
  modified_base 18: mod_base = OTHER; note = 2'-O-methylguanosine-3'-phosphate
  modified_base 19: mod_base = OTHER; note = 2'-O-methyladenosine-3'-phosphate
  modified_base 20: mod_base = OTHER; note = 2'-O-methyluridine-3'-phosphate
  modified_base 21: mod_base = OTHER; note = 2'-O-methyluridine-3'-phosphorothioate
  modified_base 22: mod_base = OTHER; note = 2'-O-methylcytidine-3'-phosphorothioate
  modified_base 23: mod_base = OTHER; note = 2'-O-methylcytidine
agacaatcgcaatggcagattcc

SEQ ID NO: 1017 - RNA, 23 nt, synthetic construct
  source 1..23: mol_type = other RNA
  modified_base 1: mod_base = OTHER; note = 2'-O-methyladenosine-3'-phosphorothioate
  modified_base 2: mod_base = OTHER; note = 2'-deoxy-2'-fluorocytidine-3'-phosphorothioate
  modified_base 3: mod_base = OTHER; note = 2'-O-methyluridine-3'-phosphate
  modified_base 4: mod_base = OTHER; note = 2'-O-methylguanosine-3'-phosphate
  modified_base 5: mod_base = OTHER; note = 2'-O-methylguanosine-3'-phosphate
  modified_base 6: mod_base = OTHER; note = 2'-deoxy-2'-fluoroadenosine-3'-phosphate
  modified_base 7: mod_base = OTHER; note = 2'-O-methylcytidine-3'-phosphate
  modified_base 8: mod_base = OTHER; note = 2'-O-methyladenosine-3'-phosphate
  modified_base 9: mod_base = OTHER; note = 2'-O-methyladenosine-3'-phosphate
  modified_base 10: mod_base = OTHER; note = 2'-O-methyluridine-3'-phosphate
  modified_base 11: mod_base = OTHER; note = 2'-O-methylcytidine-3'-phosphate
  modified_base 12: mod_base = OTHER; note = 2'-O-methylguanosine-3'-phosphate
  modified_base 13: mod_base = OTHER; note = 2'-O-methylcytidine-3'-phosphate
  modified_base 14: mod_base = OTHER; note = 2'-deoxy-2'-fluoroadenosine-3'-phosphate
  modified_base 15: mod_base = OTHER; note = 2'-O-methyladenosine-3'-phosphate
  modified_base 16: mod_base = OTHER; note = 2'-deoxy-2'-fluorouridine-3'-phosphate
  modified_base 17: mod_base = OTHER; note = 2'-O-methylguanosine-3'-phosphate
  modified_base 18: mod_base = OTHER; note = 2'-O-methylguanosine-3'-phosphate
  modified_base 19: mod_base = OTHER; note = 2'-O-methylcytidine-3'-phosphate
  modified_base 20: mod_base = OTHER; note = 2'-O-methyladenosine-3'-phosphate
  modified_base 21: mod_base = OTHER; note = 2'-O-methylguanosine-3'-phosphorothioate
  modified_base 22: mod_base = OTHER; note = 2'-O-methyladenosine-3'-phosphorothioate
  modified_base 23: mod_base = OTHER; note = 2'-O-methyluridine
actggacaatcgcaatggcagat

SEQ ID NO: 1018 - DNA, 23 bp, synthetic construct
  source 1..23: mol_type = other DNA
  modified_base 1: mod_base = OTHER; note = 2'-O-methyladenosine-3'-phosphorothioate
  modified_base 2: mod_base = OTHER; note = 2'-deoxy-2'-fluorouridine-3'-phosphorothioate
  modified_base 3: mod_base = OTHER; note = 2'-O-methylcytidine-3'-phosphate
  modified_base 4: mod_base = OTHER; note = 2'-O-methyluridine-3'-phosphate
  modified_base 6: mod_base = OTHER; note = 2'-O-methylguanosine-3'-phosphate
  modified_base 7: mod_base = OTHER; note = Adenosine-glycol nucleic acid (GNA), S-isomer
  modified_base 8: mod_base = OTHER; note = 2'-O-methylcytidine-3'-phosphate
  modified_base 9: mod_base = OTHER; note = 2'-O-methyladenosine-3'-phosphate
  modified_base 10: mod_base = OTHER; note = 2'-O-methyladenosine-3'-phosphate
  modified_base 11: mod_base = OTHER; note = 2'-O-methyluridine-3'-phosphate
  modified_base 12: mod_base = OTHER; note = 2'-O-methylcytidine-3'-phosphate
  modified_base 13: mod_base = OTHER; note = 2'-O-methylguanosine-3'-phosphate
  modified_base 14: mod_base = OTHER; note = 2'-deoxy-2'-fluorocytidine-3'-phosphate
  modified_base 15: mod_base = OTHER; note = 2'-O-methyladenosine-3'-phosphate
  modified_base 16: mod_base = OTHER; note = 2'-deoxy-2'-fluoroadenosine-3'-phosphate
  modified_base 17: mod_base = OTHER; note = 2'-O-methyluridine-3'-phosphate
  modified_base 18: mod_base = OTHER; note = 2'-O-methylguanosine-3'-phosphate
  modified_base 19: mod_base = OTHER; note = 2'-O-methylguanosine-3'-phosphate
  modified_base 20: mod_base = OTHER; note = 2'-O-methylcytidine-3'-phosphate
  modified_base 21: mod_base = OTHER; note = 2'-O-methyladenosine-3'-phosphorothioate
  modified_base 22: mod_base = OTHER; note = 2'-O-methylguanosine-3'-phosphorothioate
  modified_base 23: mod_base = OTHER; note = 2'-O-methyladenosine
  misc_feature 1..4: note = RNA
  misc_feature 6..23: note = RNA
  misc_feature 5: note = DNA
atctggacaatcgcaatggcaga

SEQ ID NO: 1019 - DNA, 23 bp, synthetic construct
  source 1..23: mol_type = other DNA
  modified_base 1: mod_base = OTHER; note = 2'-O-methyladenosine-3'-phosphorothioate
  modified_base 2: mod_base = OTHER; note = 2'-deoxy-2'-fluoroguanosine-3'-phosphorothioate
  modified_base 3: mod_base = OTHER; note = 2'-O-methyluridine-3'-phosphate
  modified_base 4: mod_base = OTHER; note = 2'-O-methylcytidine-3'-phosphate
  modified_base 6: mod_base = OTHER; note = 2'-O-methylcytidine-3'-phosphate
  modified_base 7: mod_base = OTHER; note = Thymidine-glycol nucleic acid (GNA), S-Isomer
  modified_base 8: mod_base = OTHER; note = 2'-O-methylguanosine-3'-phosphate
  modified_base 9: mod_base = OTHER; note = 2'-O-methylguanosine-3'-phosphate
  modified_base 10: mod_base = OTHER; note = 2'-O-methyladenosine-3'-phosphate
  modified_base 11: mod_base = OTHER; note = 2'-O-methylcytidine-3'-phosphate
  modified_base 12: mod_base = OTHER; note = 2'-O-methyladenosine-3'-phosphate
  modified_base 13: mod_base = OTHER; note = 2'-O-methyladenosine-3'-phosphate
  modified_base 14: mod_base = OTHER; note = 2'-deoxy-2'-fluorouridine-3'-phosphate
  modified_base 15: mod_base = OTHER; note = 2'-O-methylcytidine-3'-phosphate
  modified_base 16: mod_base = OTHER; note = 2'-deoxy-2'-fluoroguanosine-3'-phosphate
  modified_base 17: mod_base = OTHER; note = 2'-O-methylcytidine-3'-phosphate
  modified_base 18: mod_base = OTHER; note = 2'-O-methyladenosine-3'-phosphate
  modified_base 19: mod_base = OTHER; note = 2'-O-methyladenosine-3'-phosphate
  modified_base 20: mod_base = OTHER; note = 2'-O-methyluridine-3'-phosphate
  modified_base 21: mod_base = OTHER; note = 2'-O-methylguanosine-3'-phosphorothioate
  modified_base 22: mod_base = OTHER; note = 2'-O-methylguanosine-3'-phosphorothioate
  modified_base 23: mod_base = OTHER; note = 2'-O-methylcytidine
  misc_feature 1..4: note = RNA
  misc_feature 6..23: note = RNA
  misc_feature 5: note = DNA
agtctctggacaatcgcaatggc

SEQ ID NO: 1020 - RNA, 23 nt, synthetic construct
  source 1..23: mol_type = other RNA
  modified_base 1: mod_base = OTHER; note = 2'-O-methyladenosine-3'-phosphorothioate
  modified_base 2: mod_base = OTHER; note = 2'-deoxy-2'-fluorocytidine-3'-phosphorothioate
  modified_base 3: mod_base = OTHER; note = 2'-O-methyladenosine-3'-phosphate
  modified_base 4: mod_base = OTHER; note = 2'-O-methylguanosine-3'-phosphate
  modified_base 5: mod_base = OTHER; note = 2'-O-methyluridine-3'-phosphate
  modified_base 6: mod_base = OTHER; note = 2'-deoxy-2'-fluorocytidine-3'-phosphate
  modified_base 7: mod_base = OTHER; note = 2'-O-methyluridine-3'-phosphate
  modified_base 8: mod_base = OTHER; note = 2'-O-methylcytidine-3'-phosphate
  modified_base 9: mod_base = OTHER; note = 2'-O-methyluridine-3'-phosphate
  modified_base 10: mod_base = OTHER; note = 2'-O-methylguanosine-3'-phosphate
  modified_base 11: mod_base = OTHER; note = 2'-O-methylguanosine-3'-phosphate
  modified_base 12: mod_base = OTHER; note = 2'-O-methyladenosine-3'-phosphate
  modified_base 13: mod_base = OTHER; note = 2'-O-methylcytidine-3'-phosphate
  modified_base 14: mod_base = OTHER; note = 2'-deoxy-2'-fluoroadenosine-3'-phosphate
  modified_base 15: mod_base = OTHER; note = 2'-O-methyladenosine-3'-phosphate
  modified_base 16: mod_base = OTHER; note = 2'-deoxy-2'-fluorouridine-3'-phosphate
  modified_base 17: mod_base = OTHER; note = 2'-O-methylcytidine-3'-phosphate
  modified_base 18: mod_base = OTHER; note = 2'-O-methylguanosine-3'-phosphate
  modified_base 19: mod_base = OTHER; note = 2'-O-methylcytidine-3'-phosphate
  modified_base 20: mod_base = OTHER; note = 2'-O-methyladenosine-3'-phosphate
  modified_base 21: mod_base = OTHER; note = 2'-O-methyladenosine-3'-phosphorothioate
  modified_base 22: mod_base = OTHER; note = 2'-O-methyluridine-3'-phosphorothioate
  modified_base 23: mod_base = OTHER; note = 2'-O-methylguanosine
acagtctctggacaatcgcaatg

SEQ ID NO: 1021 - DNA, 23 bp, synthetic construct
  source 1..23: mol_type = other DNA
  modified_base 1: mod_base = OTHER; note = 2'-O-methyladenosine-3'-phosphorothioate
  modified_base 2: mod_base = OTHER; note = 2'-deoxy-2'-fluorocytidine-3'-phosphorothioate
  modified_base 3: mod_base = OTHER; note = 2'-O-methyladenosine-3'-phosphate
  modified_base 4: mod_base = OTHER; note = 2'-O-methylguanosine-3'-phosphate
  modified_base 6: mod_base = OTHER; note = 2'-O-methylcytidine-3'-phosphate
  modified_base 7: mod_base = OTHER; note = Thymidine-glycol nucleic acid (GNA), S-Isomer
  modified_base 8: mod_base = OTHER; note = 2'-O-methylcytidine-3'-phosphate
  modified_base 9: mod_base = OTHER; note = 2'-O-methyluridine-3'-phosphate
  modified_base 10: mod_base = OTHER; note = 2'-O-methylguanosine-3'-phosphate
  modified_base 11: mod_base = OTHER; note = 2'-O-methylguanosine-3'-phosphate
  modified_base 12: mod_base = OTHER; note = 2'-O-methyladenosine-3'-phosphate
  modified_base 13: mod_base = OTHER; note = 2'-O-methylcytidine-3'-phosphate
  modified_base 14: mod_base = OTHER; note = 2'-deoxy-2'-fluoroadenosine-3'-phosphate
  modified_base 15: mod_base = OTHER; note = 2'-O-methyladenosine-3'-phosphate
  modified_base 16: mod_base = OTHER; note = 2'-deoxy-2'-fluorouridine-3'-phosphate
  modified_base 17: mod_base = OTHER; note = 2'-O-methylcytidine-3'-phosphate
  modified_base 18: mod_base = OTHER; note = 2'-O-methylguanosine-3'-phosphate
  modified_base 19: mod_base = OTHER; note = 2'-O-methylcytidine-3'-phosphate
  modified_base 20: mod_base = OTHER; note = 2'-O-methyladenosine-3'-phosphate
  modified_base 21: mod_base = OTHER; note = 2'-O-methyladenosine-3'-phosphorothioate
  modified_base 22: mod_base = OTHER; note = 2'-O-methyluridine-3'-phosphorothioate
  modified_base 23: mod_base = OTHER; note = 2'-O-methylguanosine
  misc_feature 1..4: note = RNA
  misc_feature 6..23: note = RNA
  misc_feature 5: note = DNA
acagtctctggacaatcgcaatg

SEQ ID NO: 1022 - RNA, 23 nt, synthetic construct
  source 1..23: mol_type = other RNA
  modified_base 1: mod_base = OTHER; note = 2'-O-methyladenosine-3'-phosphorothioate
  modified_base 2: mod_base = OTHER; note = 2'-deoxy-2'-fluorocytidine-3'-phosphorothioate
  modified_base 3: mod_base = OTHER; note = 2'-O-methylcytidine-3'-phosphate
  modified_base 4: mod_base = OTHER; note = 2'-O-methyladenosine-3'-phosphate
  modified_base 5: mod_base = OTHER; note = 2'-O-methylguanosine-3'-phosphate
  modified_base 6: mod_base = OTHER; note = 2'-deoxy-2'-fluorouridine-3'-phosphate
  modified_base 7: mod_base = OTHER; note = 2'-O-methylcytidine-3'-phosphate
  modified_base 8: mod_base = OTHER; note = 2'-O-methyluridine-3'-phosphate
  modified_base 9: mod_base = OTHER; note = 2'-O-methylcytidine-3'-phosphate
  modified_base 10: mod_base = OTHER; note = 2'-O-methyluridine-3'-phosphate
  modified_base 11: mod_base = OTHER; note = 2'-O-methylguanosine-3'-phosphate
  modified_base 12: mod_base = OTHER; note = 2'-O-methylguanosine-3'-phosphate
  modified_base 13: mod_base = OTHER; note = 2'-O-methyladenosine-3'-phosphate
  modified_base 14: mod_base = OTHER; note = 2'-deoxy-2'-fluorocytidine-3'-phosphate
  modified_base 15: mod_base = OTHER; note = 2'-O-methyladenosine-3'-phosphate
  modified_base 16: mod_base = OTHER; note = 2'-deoxy-2'-fluoroadenosine-3'-phosphate
  modified_base 17: mod_base = OTHER; note = 2'-O-methyluridine-3'-phosphate
  modified_base 18: mod_base = OTHER; note = 2'-O-methylcytidine-3'-phosphate
  modified_base 19: mod_base = OTHER; note = 2'-O-methylguanosine-3'-phosphate
  modified_base 20: mod_base = OTHER; note = 2'-O-methylcytidine-3'-phosphate
  modified_base 21: mod_base = OTHER; note = 2'-O-methyladenosine-3'-phosphorothioate
  modified_base 22: mod_base = OTHER; note = 2'-O-methyladenosine-3'-phosphorothioate
  modified_base 23: mod_base = OTHER; note = 2'-O-methyluridine
accagtctctggacaatcgcaat

SEQ ID NO: 1023 - DNA, 23 bp, synthetic construct
  source 1..23: mol_type = other DNA
  modified_base 1: mod_base = OTHER; note = 2'-O-methyladenosine-3'-phosphorothioate
  modified_base 2: mod_base = OTHER; note = 2'-deoxy-2'-fluoroadenosine-3'-phosphorothioate
  modified_base 3: mod_base = OTHER; note = 2'-O-methylcytidine-3'-phosphate
  modified_base 4: mod_base = OTHER; note = 2'-O-methylcytidine-3'-phosphate
  modified_base 6: mod_base = OTHER; note = 2'-O-methylguanosine-3'-phosphate
  modified_base 7: mod_base = OTHER; note = Thymidine-glycol nucleic acid (GNA), S-Isomer
  modified_base 8: mod_base = OTHER; note = 2'-O-methylcytidine-3'-phosphate
  modified_base 9: mod_base = OTHER; note = 2'-O-methyluridine-3'-phosphate
  modified_base 10: mod_base = OTHER; note = 2'-O-methylcytidine-3'-phosphate
  modified_base 11: mod_base = OTHER; note = 2'-O-methyluridine-3'-phosphate
  modified_base 12: mod_base = OTHER; note = 2'-O-methylguanosine-3'-phosphate
  modified_base 13: mod_base = OTHER; note = 2'-O-methylguanosine-3'-phosphate
  modified_base 14: mod_base = OTHER; note = 2'-deoxy-2'-fluoroadenosine-3'-phosphate
  modified_base 15: mod_base = OTHER; note = 2'-O-methylcytidine-3'-phosphate
  modified_base 16: mod_base = OTHER; note = 2'-deoxy-2'-fluoroadenosine-3'-phosphate
  modified_base 17: mod_base = OTHER; note = 2'-O-methyladenosine-3'-phosphate
  modified_base 18: mod_base = OTHER; note = 2'-O-methyluridine-3'-phosphate
  modified_base 19: mod_base = OTHER; note = 2'-O-methylcytidine-3'-phosphate
  modified_base 20: mod_base = OTHER; note = 2'-O-methylguanosine-3'-phosphate
  modified_base 21: mod_base = OTHER; note = 2'-O-methylcytidine-3'-phosphorothioate
  modified_base 22: mod_base = OTHER; note = 2'-O-methyladenosine-3'-phosphorothioate
  modified_base 23: mod_base = OTHER; note = 2'-O-methyladenosine
  misc_feature 1..4: note = RNA
  misc_feature 6..23: note = RNA
  misc_feature 5: note = DNA
aaccagtctctggacaatcgcaa

SEQ ID NO: 1024 - RNA, 23 nt, synthetic construct
  source 1..23: mol_type = other RNA
  modified_base 1: mod_base = OTHER; note = 2'-O-methyladenosine-3'-phosphorothioate
  modified_base 2: mod_base = OTHER; note = 2'-deoxy-2'-fluorocytidine-3'-phosphorothioate
  modified_base 3: mod_base = OTHER; note = 2'-O-methyladenosine-3'-phosphate
  modified_base 4: mod_base = OTHER; note = 2'-O-methylcytidine-3'-phosphate
  modified_base 5: mod_base = OTHER; note = 2'-O-methylcytidine-3'-phosphate
  modified_base 6: mod_base = OTHER; note = 2'-deoxy-2'-fluoroadenosine-3'-phosphate
  modified_base 7: mod_base = OTHER; note = 2'-O-methylguanosine-3'-phosphate
  modified_base 8: mod_base = OTHER; note = 2'-O-methyluridine-3'-phosphate
  modified_base 9: mod_base = OTHER; note = 2'-O-methylcytidine-3'-phosphate
  modified_base 10: mod_base = OTHER; note = 2'-O-methyluridine-3'-phosphate
  modified_base 11: mod_base = OTHER; note = 2'-O-methylcytidine-3'-phosphate
  modified_base 12: mod_base = OTHER; note = 2'-O-methyluridine-3'-phosphate
  modified_base 13: mod_base = OTHER; note = 2'-O-methylguanosine-3'-phosphate
  modified_base 14: mod_base = OTHER; note = 2'-deoxy-2'-fluoroguanosine-3'-phosphate
  modified_base 15: mod_base = OTHER; note = 2'-O-methyladenosine-3'-phosphate
  modified_base 16: mod_base = OTHER; note = 2'-deoxy-2'-fluorocytidine-3'-phosphate
  modified_base 17: mod_base = OTHER; note = 2'-O-methyladenosine-3'-phosphate
  modified_base 18: mod_base = OTHER; note = 2'-O-methyladenosine-3'-phosphate
  modified_base 19: mod_base = OTHER; note = 2'-O-methyluridine-3'-phosphate
  modified_base 20: mod_base = OTHER; note = 2'-O-methylcytidine-3'-phosphate
  modified_base 21: mod_base = OTHER; note = 2'-O-methylguanosine-3'-phosphorothioate
  modified_base 22: mod_base = OTHER; note = 2'-O-methylcytidine-3'-phosphorothioate
  modified_base 23: mod_base = OTHER; note = 2'-O-methyladenosine
acaccagtctctggacaatcgca

SEQ ID NO: 1025 - DNA, 23 bp, synthetic construct
  source 1..23: mol_type = other DNA
  modified_base 1: mod_base = OTHER; note = 2'-O-methyladenosine-3'-phosphorothioate
  modified_base 2: mod_base = OTHER; note = 2'-deoxy-2'-fluorouridine-3'-phosphorothioate
  modified_base 3: mod_base = OTHER; note = 2'-O-methylcytidine-3'-phosphate
  modified_base 4: mod_base = OTHER; note = 2'-O-methyladenosine-3'-phosphate
  modified_base 6: mod_base = OTHER; note = 2'-O-methylcytidine-3'-phosphate
  modified_base 7: mod_base = OTHER; note = Adenosine-glycol nucleic acid (GNA), S-isomer
  modified_base 8: mod_base = OTHER; note = 2'-O-methylguanosine-3'-phosphate
  modified_base 9: mod_base = OTHER; note = 2'-O-methyluridine-3'-phosphate
  modified_base 10: mod_base = OTHER; note = 2'-O-methylcytidine-3'-phosphate
  modified_base 11: mod_base = OTHER; note = 2'-O-methyluridine-3'-phosphate
  modified_base 12: mod_base = OTHER; note = 2'-O-methylcytidine-3'-phosphate
  modified_base 13: mod_base = OTHER; note = 2'-O-methyluridine-3'-phosphate
  modified_base 14: mod_base = OTHER; note = 2'-deoxy-2'-fluoroguanosine-3'-phosphate
  modified_base 15: mod_base = OTHER; note = 2'-O-methylguanosine-3'-phosphate
  modified_base 16: mod_base = OTHER; note = 2'-deoxy-2'-fluoroadenosine-3'-phosphate
  modified_base 17: mod_base = OTHER; note = 2'-O-methylcytidine-3'-phosphate
  modified_base 18: mod_base = OTHER; note = 2'-O-methyladenosine-3'-phosphate
  modified_base 19: mod_base = OTHER; note = 2'-O-methyladenosine-3'-phosphate
  modified_base 20: mod_base = OTHER; note = 2'-O-methyluridine-3'-phosphate
  modified_base 21: mod_base = OTHER; note = 2'-O-methylcytidine-3'-phosphorothioate
  modified_base 22: mod_base = OTHER; note = 2'-O-methylguanosine-3'-phosphorothioate
  modified_base 23: mod_base = OTHER; note = 2'-O-methylcytidine
  misc_feature 1..4: note = RNA
  misc_feature 6..23: note = RNA
  misc_feature 5: note = DNA
atcaccagtctctggacaatcgc

SEQ ID NO: 1026 - DNA, 23 bp, synthetic construct
  source 1..23: mol_type = other DNA
  modified_base 1: mod_base = OTHER; note = 2'-O-methyladenosine-3'-phosphorothioate
  modified_base 2: mod_base = OTHER; note = 2'-deoxy-2'-fluoroadenosine-3'-phosphorothioate
  modified_base 3: mod_base = OTHER; note = 2'-O-methyluridine-3'-phosphate
  modified_base 4: mod_base = OTHER; note = 2'-O-methylguanosine-3'-phosphate
  modified_base 6: mod_base = OTHER; note = 2'-O-methylcytidine-3'-phosphate
  modified_base 7: mod_base = OTHER; note = Adenosine-glycol nucleic acid (GNA), S-isomer
  modified_base 8: mod_base = OTHER; note = 2'-O-methylcytidine-3'-phosphate
  modified_base 9: mod_base = OTHER; note = 2'-O-methylcytidine-3'-phosphate
  modified_base 10: mod_base = OTHER; note = 2'-O-methyladenosine-3'-phosphate
  modified_base 11: mod_base = OTHER; note = 2'-O-methylguanosine-3'-phosphate
  modified_base 12: mod_base = OTHER; note = 2'-O-methyluridine-3'-phosphate
  modified_base 13: mod_base = OTHER; note = 2'-O-methylcytidine-3'-phosphate
  modified_base 14: mod_base = OTHER; note = 2'-deoxy-2'-fluorouridine-3'-phosphate
  modified_base 15: mod_base = OTHER; note = 2'-O-methylcytidine-3'-phosphate
  modified_base 16: mod_base = OTHER; note = 2'-deoxy-2'-fluorouridine-3'-phosphate
  modified_base 17: mod_base = OTHER; note = 2'-O-methylguanosine-3'-phosphate
  modified_base 18: mod_base = OTHER; note = 2'-O-methylguanosine-3'-phosphate
  modified_base 19: mod_base = OTHER; note = 2'-O-methyladenosine-3'-phosphate
  modified_base 20: mod_base = OTHER; note = 2'-O-methylcytidine-3'-phosphate
  modified_base 21: mod_base = OTHER; note = 2'-O-methyladenosine-3'-phosphorothioate
  modified_base 22: mod_base = OTHER; note = 2'-O-methyladenosine-3'-phosphorothioate
  modified_base 23: mod_base = OTHER; note = 2'-O-methyluridine
  misc_feature 1..4: note = RNA
  misc_feature 6..23: note = RNA
  misc_feature 5: note = DNA
aatgtcaccagtctctggacaat

SEQ ID NO: 1027 - RNA, 23 nt, synthetic construct
  source 1..23: mol_type = other RNA
  modified_base 1: mod_base = OTHER; note = 2'-O-methyladenosine-3'-phosphorothioate
  modified_base 2: mod_base = OTHER; note = 2'-deoxy-2'-fluoroadenosine-3'-phosphorothioate
  modified_base 3: mod_base = OTHER; note = 2'-O-methylguanosine-3'-phosphate
  modified_base 4: mod_base = OTHER; note = 2'-O-methylcytidine-3'-phosphate
  modified_base 5: mod_base = OTHER; note = 2'-O-methylcytidine-3'-phosphate
  modified_base 6: mod_base = OTHER; note = 2'-deoxy-2'-fluoroadenosine-3'-phosphate
  modified_base 7: mod_base = OTHER; note = 2'-O-methyluridine-3'-phosphate
  modified_base 8: mod_base = OTHER; note = 2'-O-methylguanosine-3'-phosphate
  modified_base 9: mod_base = OTHER; note = 2'-O-methyluridine-3'-phosphate
  modified_base 10: mod_base = OTHER; note = 2'-O-methylcytidine-3'-phosphate
  modified_base 11: mod_base = OTHER; note = 2'-O-methyladenosine-3'-phosphate
  modified_base 12: mod_base = OTHER; note = 2'-O-methylcytidine-3'-phosphate
  modified_base 13: mod_base = OTHER; note = 2'-O-methylcytidine-3'-phosphate
  modified_base 14: mod_base = OTHER; note = 2'-deoxy-2'-fluoroadenosine-3'-phosphate
  modified_base 15: mod_base = OTHER; note = 2'-O-methylguanosine-3'-phosphate
  modified_base 16: mod_base = OTHER; note = 2'-deoxy-2'-fluorouridine-3'-phosphate
  modified_base 17: mod_base = OTHER; note = 2'-O-methylcytidine-3'-phosphate
  modified_base 18: mod_base = OTHER; note = 2'-O-methyluridine-3'-phosphate
  modified_base 19: mod_base = OTHER; note = 2'-O-methylcytidine-3'-phosphate
  modified_base 20: mod_base = OTHER; note = 2'-O-methyluridine-3'-phosphate
  modified_base 21: mod_base = OTHER; note = 2'-O-methylguanosine-3'-phosphorothioate
  modified_base 22: mod_base = OTHER; note = 2'-O-methylguanosine-3'-phosphorothioate
  modified_base 23: mod_base = OTHER; note = 2'-O-methyladenosine
aagccatgtcaccagtctctgga

SEQ ID NO: 1028 - RNA, 23 nt, synthetic construct
  source 1..23: mol_type = other RNA
  modified_base 1: mod_base = OTHER; note = 2'-O-methyladenosine-3'-phosphorothioate
  modified_base 2: mod_base = OTHER; note = 2'-deoxy-2'-fluoroadenosine-3'-phosphorothioate
  modified_base 3: mod_base = OTHER; note = 2'-O-methyladenosine-3'-phosphate
  modified_base 4: mod_base = OTHER; note = 2'-O-methylguanosine-3'-phosphate
  modified_base 5: mod_base = OTHER; note = 2'-O-methylcytidine-3'-phosphate
  modified_base 6: mod_base = OTHER; note = 2'-deoxy-2'-fluorocytidine-3'-phosphate
  modified_base 7: mod_base = OTHER; note = 2'-O-methyladenosine-3'-phosphate
  modified_base 8: mod_base = OTHER; note = 2'-O-methyluridine-3'-phosphate
  modified_base 9: mod_base = OTHER; note = 2'-O-methylguanosine-3'-phosphate
  modified_base 10: mod_base = OTHER; note = 2'-O-methyluridine-3'-phosphate
  modified_base 11: mod_base = OTHER; note = 2'-O-methylcytidine-3'-phosphate
  modified_base 12: mod_base = OTHER; note = 2'-O-methyladenosine-3'-phosphate
  modified_base 13: mod_base = OTHER; note = 2'-O-methylcytidine-3'-phosphate
  modified_base 14: mod_base = OTHER; note = 2'-deoxy-2'-fluorocytidine-3'-phosphate
  modified_base 15: mod_base = OTHER; note = 2'-O-methyladenosine-3'-phosphate
  modified_base 16: mod_base = OTHER; note = 2'-deoxy-2'-fluoroguanosine-3'-phosphate
  modified_base 17: mod_base = OTHER; note = 2'-O-methyluridine-3'-phosphate
  modified_base 18: mod_base = OTHER; note = 2'-O-methylcytidine-3'-phosphate
  modified_base 19: mod_base = OTHER; note = 2'-O-methyluridine-3'-phosphate
  modified_base 20: mod_base = OTHER; note = 2'-O-methylcytidine-3'-phosphate
  modified_base 21: mod_base = OTHER; note = 2'-O-methyluridine-3'-phosphorothioate
  modified_base 22: mod_base = OTHER; note = 2'-O-methylguanosine-3'-phosphorothioate
  modified_base 23: mod_base = OTHER; note = 2'-O-methylguanosine
aaagccatgtcaccagtctctgg

SEQ ID NO: 1029 - DNA, 23 bp, synthetic construct
  source 1..23: mol_type = other DNA
  modified_base 1: mod_base = OTHER; note = 2'-O-methyladenosine-3'-phosphorothioate
  modified_base 2: mod_base = OTHER; note = 2'-deoxy-2'-fluoroadenosine-3'-phosphorothioate
  modified_base 3: mod_base = OTHER; note = 2'-O-methyladenosine-3'-phosphate
  modified_base 4: mod_base = OTHER; note = 2'-O-methylguanosine-3'-phosphate
  modified_base 6: mod_base = OTHER; note = 2'-O-methylcytidine-3'-phosphate
  modified_base 7: mod_base = OTHER; note = Adenosine-glycol nucleic acid (GNA), S-isomer
  modified_base 8: mod_base = OTHER; note = 2'-O-methyluridine-3'-phosphate
  modified_base 9: mod_base = OTHER; note = 2'-O-methylguanosine-3'-phosphate
  modified_base 10: mod_base = OTHER; note = 2'-O-methyluridine-3'-phosphate
  modified_base 11: mod_base = OTHER; note = 2'-O-methylcytidine-3'-phosphate
  modified_base 12: mod_base = OTHER; note = 2'-O-methyladenosine-3'-phosphate
  modified_base 13: mod_base = OTHER; note = 2'-O-methylcytidine-3'-phosphate
  modified_base 14: mod_base = OTHER; note = 2'-deoxy-2'-fluorocytidine-3'-phosphate
  modified_base 15: mod_base = OTHER; note = 2'-O-methyladenosine-3'-phosphate
  modified_base 16: mod_base = OTHER; note = 2'-deoxy-2'-fluoroguanosine-3'-phosphate
  modified_base 17: mod_base = OTHER; note = 2'-O-methyluridine-3'-phosphate
  modified_base 18: mod_base = OTHER; note = 2'-O-methylcytidine-3'-phosphate
  modified_base 19: mod_base = OTHER; note = 2'-O-methyluridine-3'-phosphate
  modified_base 20: mod_base = OTHER; note = 2'-O-methylcytidine-3'-phosphate
  modified_base 21: mod_base = OTHER; note = 2'-O-methyluridine-3'-phosphorothioate
  modified_base 22: mod_base = OTHER; note = 2'-O-methylguanosine-3'-phosphorothioate
  modified_base 23: mod_base = OTHER; note = 2'-O-methylguanosine
  misc_feature 1..4: note = RNA
  misc_feature 6..23: note = RNA
  misc_feature 5: note = DNA
aaagccatgtcaccagtctctgg

SEQ ID NO: 1030 - RNA, 23 nt, synthetic construct
  source 1..23: mol_type = other RNA
  modified_base 1: mod_base = OTHER; note = 2'-O-methyladenosine-3'-phosphorothioate
  modified_base 2: mod_base = OTHER; note = 2'-deoxy-2'-fluorocytidine-3'-phosphorothioate
  modified_base 3: mod_base = OTHER; note = 2'-O-methyluridine-3'-phosphate
  modified_base 4: mod_base = OTHER; note = 2'-O-methylguanosine-3'-phosphate
  modified_base 5: mod_base = OTHER; note = 2'-O-methylguanosine-3'-phosphate
  modified_base 6: mod_base = OTHER; note = 2'-deoxy-2'-fluoroadenosine-3'-phosphate
  modified_base 7: mod_base = OTHER; note = 2'-O-methyladenosine-3'-phosphate
  modified_base 8: mod_base = OTHER; note = 2'-O-methylguanosine-3'-phosphate
  modified_base 9: mod_base = OTHER; note = 2'-O-methylcytidine-3'-phosphate
  modified_base 10: mod_base = OTHER; note = 2'-O-methylcytidine-3'-phosphate
  modified_base 11: mod_base = OTHER; note = 2'-O-methyladenosine-3'-phosphate
  modified_base 12: mod_base = OTHER; note = 2'-O-methyluridine-3'-phosphate
  modified_base 13: mod_base = OTHER; note = 2'-O-methylguanosine-3'-phosphate
  modified_base 14: mod_base = OTHER; note = 2'-deoxy-2'-fluorouridine-3'-phosphate
  modified_base 15: mod_base = OTHER; note = 2'-O-methylcytidine-3'-phosphate
  modified_base 16: mod_base = OTHER; note = 2'-deoxy-2'-fluoroadenosine-3'-phosphate
  modified_base 17: mod_base = OTHER; note = 2'-O-methylcytidine-3'-phosphate
  modified_base 18: mod_base = OTHER; note = 2'-O-methylcytidine-3'-phosphate
  modified_base 19: mod_base = OTHER; note = 2'-O-methyladenosine-3'-phosphate
  modified_base 20: mod_base = OTHER; note = 2'-O-methylguanosine-3'-phosphate
  modified_base 21: mod_base = OTHER; note = 2'-O-methyluridine-3'-phosphorothioate
  modified_base 22: mod_base = OTHER; note = 2'-O-methylcytidine-3'-phosphorothioate
  modified_base 23: mod_base = OTHER; note = 2'-O-methyluridine
actggaagccatgtcaccagtct

SEQ ID NO: 1031 - DNA, 23 bp, synthetic construct
  source 1..23: mol_type = other DNA
  modified_base 1: mod_base = OTHER; note = 2'-O-methyladenosine-3'-phosphorothioate
  modified_base 2: mod_base = OTHER; note = 2'-deoxy-2'-fluorouridine-3'-phosphorothioate
  modified_base 3: mod_base = OTHER; note = 2'-O-methylcytidine-3'-phosphate
  modified_base 4: mod_base = OTHER; note = 2'-O-methyluridine-3'-phosphate
  modified_base 6: mod_base = OTHER; note = 2'-O-methylguanosine-3'-phosphate
  modified_base 7: mod_base = OTHER; note = Adenosine-glycol nucleic acid (GNA), S-isomer
  modified_base 8: mod_base = OTHER; note = 2'-O-methyladenosine-3'-phosphate
  modified_base 9: mod_base = OTHER; note = 2'-O-methylguanosine-3'-phosphate
  modified_base 10: mod_base = OTHER; note = 2'-O-methylcytidine-3'-phosphate
  modified_base 11: mod_base = OTHER; note = 2'-O-methylcytidine-3'-phosphate
  modified_base 12: mod_base = OTHER; note = 2'-O-methyladenosine-3'-phosphate
  modified_base 13: mod_base = OTHER; note = 2'-O-methyluridine-3'-phosphate
  modified_base 14: mod_base = OTHER; note = 2'-deoxy-2'-fluoroguanosine-3'-phosphate
  modified_base 15: mod_base = OTHER; note = 2'-O-methyluridine-3'-phosphate
  modified_base 16: mod_base = OTHER; note = 2'-deoxy-2'-fluorocytidine-3'-phosphate
  modified_base 17: mod_base = OTHER; note = 2'-O-methyladenosine-3'-phosphate
  modified_base 18: mod_base = OTHER; note = 2'-O-methylcytidine-3'-phosphate
  modified_base 19: mod_base = OTHER; note = 2'-O-methylcytidine-3'-phosphate
  modified_base 20: mod_base = OTHER; note = 2'-O-methyladenosine-3'-phosphate
  modified_base 21: mod_base = OTHER; note = 2'-O-methylguanosine-3'-phosphorothioate
  modified_base 22: mod_base = OTHER; note = 2'-O-methyluridine-3'-phosphorothioate
  modified_base 23: mod_base = OTHER; note = 2'-O-methylcytidine
  misc_feature 1..4: note = RNA
  misc_feature 6..23: note = RNA
  misc_feature 5: note = DNA
atctggaagccatgtcaccagtc

SEQ ID NO: 1032 - DNA, 23 bp, synthetic construct
  source 1..23: mol_type = other DNA
  modified_base 1: mod_base = OTHER; note = 2'-O-methyladenosine-3'-phosphorothioate
  modified_base 2: mod_base = OTHER; note = 2'-deoxy-2'-fluoroadenosine-3'-phosphorothioate
  modified_base 3: mod_base = OTHER; note = 2'-O-methyluridine-3'-phosphate
  modified_base 4: mod_base = OTHER; note = 2'-O-methyladenosine-3'-phosphate
  modified_base 6: mod_base = OTHER; note = 2'-O-methylcytidine-3'-phosphate
  modified_base 7: mod_base = OTHER; note = Thymidine-glycol nucleic acid (GNA), S-Isomer
  modified_base 8: mod_base = OTHER; note = 2'-O-methylguanosine-3'-phosphate
  modified_base 9: mod_base = OTHER; note = 2'-O-methylguanosine-3'-phosphate
  modified_base 10: mod_base = OTHER; note = 2'-O-methyladenosine-3'-phosphate
  modified_base 11: mod_base = OTHER; note = 2'-O-methyladenosine-3'-phosphate
  modified_base 12: mod_base = OTHER; note = 2'-O-methylguanosine-3'-phosphate
  modified_base 13: mod_base = OTHER; note = 2'-O-methylcytidine-3'-phosphate
  modified_base 14: mod_base = OTHER; note = 2'-deoxy-2'-fluorocytidine-3'-phosphate
  modified_base 15: mod_base = OTHER; note = 2'-O-methyladenosine-3'-phosphate
  modified_base 16: mod_base = OTHER; note = 2'-deoxy-2'-fluorouridine-3'-phosphate
  modified_base 17: mod_base = OTHER; note = 2'-O-methylguanosine-3'-phosphate
  modified_base 18: mod_base = OTHER; note = 2'-O-methyluridine-3'-phosphate
  modified_base 19: mod_base = OTHER; note = 2'-O-methylcytidine-3'-phosphate
  modified_base 20: mod_base = OTHER; note = 2'-O-methyladenosine-3'-phosphate
  modified_base 21: mod_base = OTHER; note = 2'-O-methylcytidine-3'-phosphorothioate
  modified_base 22: mod_base = OTHER; note = 2'-O-methylcytidine-3'-phosphorothioate
  modified_base 23: mod_base = OTHER; note = 2'-O-methyladenosine
  misc_feature 1..4: note = RNA
  misc_feature 6..23: note = RNA
  misc_feature 5: note = DNA
aatatctggaagccatgtcacca

SEQ ID NO: 1033 - RNA, 23 nt, synthetic construct
  source 1..23: mol_type = other RNA
  modified_base 1: mod_base = OTHER; note = 2'-O-methyladenosine-3'-phosphorothioate
  modified_base 2: mod_base = OTHER; note = 2'-deoxy-2'-fluorocytidine-3'-phosphorothioate
  modified_base 3: mod_base = OTHER; note = 2'-O-methyladenosine-3'-phosphate
  modified_base 4: mod_base = OTHER; note = 2'-O-methyluridine-3'-phosphate
  modified_base 5: mod_base = OTHER; note = 2'-O-methyladenosine-3'-phosphate
  modified_base 6: mod_base = OTHER; note = 2'-deoxy-2'-fluorouridine-3'-phosphate
  modified_base 7: mod_base = OTHER; note = 2'-O-methylcytidine-3'-phosphate
  modified_base 8: mod_base = OTHER; note = 2'-O-methyluridine-3'-phosphate
  modified_base 9: mod_base = OTHER; note = 2'-O-methylguanosine-3'-phosphate
  modified_base 10: mod_base = OTHER; note = 2'-O-methylguanosine-3'-phosphate
  modified_base 11: mod_base = OTHER; note = 2'-O-methyladenosine-3'-phosphate
  modified_base 12: mod_base = OTHER; note = 2'-O-methyladenosine-3'-phosphate
  modified_base 13: mod_base = OTHER; note = 2'-O-methylguanosine-3'-phosphate
  modified_base 14: mod_base = OTHER; note = 2'-deoxy-2'-fluorocytidine-3'-phosphate
  modified_base 15: mod_base = OTHER; note = 2'-O-methylcytidine-3'-phosphate
  modified_base 16: mod_base = OTHER; note = 2'-deoxy-2'-fluoroadenosine-3'-phosphate
  modified_base 17: mod_base = OTHER; note = 2'-O-methyluridine-3'-phosphate
  modified_base 18: mod_base = OTHER; note = 2'-O-methylguanosine-3'-phosphate
  modified_base 19: mod_base = OTHER; note = 2'-O-methyluridine-3'-phosphate
  modified_base 20: mod_base = OTHER; note = 2'-O-methylcytidine-3'-phosphate
  modified_base 21: mod_base = OTHER; note = 2'-O-methyladenosine-3'-phosphorothioate
  modified_base 22: mod_base = OTHER; note = 2'-O-methylcytidine-3'-phosphorothioate
  modified_base 23: mod_base = OTHER; note = 2'-O-methylcytidine
acatatctggaagccatgtcacc

SEQ ID NO: 1034 - RNA, 23 nt, synthetic construct
  source 1..23: mol_type = other RNA
  modified_base 1: mod_base = OTHER; note = 2'-O-methyladenosine-3'-phosphorothioate
  modified_base 2: mod_base = OTHER; note = 2'-deoxy-2'-fluoroguanosine-3'-phosphorothioate
  modified_base 3: mod_base = OTHER; note = 2'-O-methylcytidine-3'-phosphate
  modified_base 4: mod_base = OTHER; note = 2'-O-methyladenosine-3'-phosphate
  modified_base 5: mod_base = OTHER; note = 2'-O-methyluridine-3'-phosphate
  modified_base 6: mod_base = OTHER; note = 2'-deoxy-2'-fluoroadenosine-3'-phosphate
  modified_base 7: mod_base = OTHER; note = 2'-O-methyluridine-3'-phosphate
  modified_base 8: mod_base = OTHER; note = 2'-O-methylcytidine-3'-phosphate
  modified_base 9: mod_base = OTHER; note = 2'-O-methyluridine-3'-phosphate
  modified_base 10: mod_base = OTHER; note = 2'-O-methylguanosine-3'-phosphate
  modified_base 11: mod_base = OTHER; note = 2'-O-methylguanosine-3'-phosphate
  modified_base 12: mod_base = OTHER; note = 2'-O-methyladenosine-3'-phosphate
  modified_base 13: mod_base = OTHER; note = 2'-O-methyladenosine-3'-phosphate
  modified_base 14: mod_base = OTHER; note = 2'-deoxy-2'-fluoroguanosine-3'-phosphate
  modified_base 15: mod_base = OTHER; note = 2'-O-methylcytidine-3'-phosphate
  modified_base 16: mod_base = OTHER; note = 2'-deoxy-2'-fluorocytidine-3'-phosphate
  modified_base 17: mod_base = OTHER; note = 2'-O-methyladenosine-3'-phosphate
  modified_base 18: mod_base = OTHER; note = 2'-O-methyluridine-3'-phosphate
  modified_base 19: mod_base = OTHER; note = 2'-O-methylguanosine-3'-phosphate
  modified_base 20: mod_base = OTHER; note = 2'-O-methyluridine-3'-phosphate
  modified_base 21: mod_base = OTHER; note = 2'-O-methylcytidine-3'-phosphorothioate
  modified_base 22: mod_base = OTHER; note = 2'-O-methyladenosine-3'-phosphorothioate
  modified_base 23: mod_base = OTHER; note = 2'-O-methylcytidine
agcatatctggaagccatgtcac

SEQ ID NO: 1035 - RNA, 23 nt, synthetic construct
  source 1..23: mol_type = other RNA
  modified_base 1: mod_base = OTHER; note = 2'-O-methyladenosine-3'-phosphorothioate
  modified_base 2: mod_base = OTHER; note = 2'-deoxy-2'-fluoroguanosine-3'-phosphorothioate
  modified_base 3: mod_base = OTHER; note = 2'-O-methylguanosine-3'-phosphate
  modified_base 4: mod_base = OTHER; note = 2'-O-methylcytidine-3'-phosphate
  modified_base 5: mod_base = OTHER; note = 2'-O-methyladenosine-3'-phosphate
  modified_base 6: mod_base = OTHER; note = 2'-deoxy-2'-fluorouridine-3'-phosphate
  modified_base 7: mod_base = OTHER; note = 2'-O-methyladenosine-3'-phosphate
  modified_base 8: mod_base = OTHER; note = 2'-O-methyluridine-3'-phosphate
  modified_base 9: mod_base = OTHER; note = 2'-O-methylcytidine-3'-phosphate
  modified_base 10: mod_base = OTHER; note = 2'-O-methyluridine-3'-phosphate
  modified_base 11: mod_base = OTHER; note = 2'-O-methylguanosine-3'-phosphate
  modified_base 12: mod_base = OTHER; note = 2'-O-methylguanosine-3'-phosphate
  modified_base 13: mod_base = OTHER; note = 2'-O-methyladenosine-3'-phosphate
  modified_base 14: mod_base = OTHER; note = 2'-deoxy-2'-fluoroadenosine-3'-phosphate
  modified_base 15: mod_base = OTHER; note = 2'-O-methylguanosine-3'-phosphate
  modified_base 16: mod_base = OTHER; note = 2'-deoxy-2'-fluorocytidine-3'-phosphate
  modified_base 17: mod_base = OTHER; note = 2'-O-methylcytidine-3'-phosphate
  modified_base 18: mod_base = OTHER; note = 2'-O-methyladenosine-3'-phosphate
  modified_base 19: mod_base = OTHER; note = 2'-O-methyluridine-3'-phosphate
  modified_base 20: mod_base = OTHER; note = 2'-O-methylguanosine-3'-phosphate
  modified_base 21: mod_base = OTHER; note = 2'-O-methyluridine-3'-phosphorothioate
  modified_base 22: mod_base = OTHER; note = 2'-O-methylcytidine-3'-phosphorothioate
  modified_base 23: mod_base = OTHER; note = 2'-O-methyladenosine
aggcatatctggaagccatgtca

SEQ ID NO: 1036 - DNA, 23 bp, synthetic construct
  source 1..23: mol_type = other DNA
  modified_base 1: mod_base = OTHER; note = 2'-O-methyladenosine-3'-phosphorothioate
  modified_base 2: mod_base = OTHER; note = 2'-deoxy-2'-fluoroguanosine-3'-phosphorothioate
  modified_base 3: mod_base = OTHER; note = 2'-O-methylguanosine-3'-phosphate
  modified_base 4: mod_base = OTHER; note = 2'-O-methylguanosine-3'-phosphate
  modified_base 6: mod_base = OTHER; note = 2'-O-methyladenosine-3'-phosphate
  modified_base 7: mod_base = OTHER; note = Thymidine-glycol nucleic acid (GNA), S-Isomer
  modified_base 8: mod_base = OTHER; note = 2'-O-methyladenosine-3'-phosphate
  modified_base 9: mod_base = OTHER; note = 2'-O-methyluridine-3'-phosphate
  modified_base 10: mod_base = OTHER; note = 2'-O-methylcytidine-3'-phosphate
  modified_base 11: mod_base = OTHER; note = 2'-O-methyluridine-3'-phosphate
  modified_base 12: mod_base = OTHER; note = 2'-O-methylguanosine-3'-phosphate
  modified_base 13: mod_base = OTHER; note = 2'-O-methylguanosine-3'-phosphate
  modified_base 14: mod_base = OTHER; note = 2'-deoxy-2'-fluoroadenosine-3'-phosphate
  modified_base 15: mod_base = OTHER; note = 2'-O-methyladenosine-3'-phosphate
  modified_base 16: mod_base = OTHER; note = 2'-deoxy-2'-fluoroguanosine-3'-phosphate
  modified_base 17: mod_base = OTHER; note = 2'-O-methylcytidine-3'-phosphate
  modified_base 18: mod_base = OTHER; note = 2'-O-methylcytidine-3'-phosphate
  modified_base 19: mod_base = OTHER; note = 2'-O-methyladenosine-3'-phosphate
  modified_base 20: mod_base = OTHER; note = 2'-O-methyluridine-3'-phosphate
  modified_base 21: mod_base = OTHER; note = 2'-O-methylguanosine-3'-phosphorothioate
  modified_base 22: mod_base = OTHER; note = 2'-O-methyluridine-3'-phosphorothioate
  modified_base 23: mod_base = OTHER; note = 2'-O-methylcytidine
  misc_feature 1..4: note = RNA
  misc_feature 6..23: note = RNA
  misc_feature 5: note = DNA
agggcatatctggaagccatgtc

SEQ ID NO: 1037 - RNA, 23 nt, synthetic construct
  source 1..23: mol_type = other RNA
  modified_base 1: mod_base = OTHER; note = 2'-O-methyladenosine-3'-phosphorothioate
  modified_base 2: mod_base = OTHER; note = 2'-deoxy-2'-fluorocytidine-3'-phosphorothioate
  modified_base 3: mod_base = OTHER; note = 2'-O-methylguanosine-3'-phosphate
  modified_base 4: mod_base = OTHER; note = 2'-O-methylguanosine-3'-phosphate
  modified_base 5: mod_base = OTHER; note = 2'-O-methylguanosine-3'-phosphate
  modified_base 6: mod_base = OTHER; note = 2'-deoxy-2'-fluorocytidine-3'-phosphate
  modified_base 7: mod_base = OTHER; note = 2'-O-methyladenosine-3'-phosphate
  modified_base 8: mod_base = OTHER; note = 2'-O-methyluridine-3'-phosphate
  modified_base 9: mod_base = OTHER; note = 2'-O-methyladenosine-3'-phosphate
  modified_base 10: mod_base = OTHER; note = 2'-O-methyluridine-3'-phosphate
  modified_base 11: mod_base = OTHER; note = 2'-O-methylcytidine-3'-phosphate
  modified_base 12: mod_base = OTHER; note = 2'-O-methyluridine-3'-phosphate
  modified_base 13: mod_base = OTHER; note = 2'-O-methylguanosine-3'-phosphate
  modified_base 14: mod_base = OTHER; note = 2'-deoxy-2'-fluoroguanosine-3'-phosphate
  modified_base 15: mod_base = OTHER; note = 2'-O-methyladenosine-3'-phosphate
  modified_base 16: mod_base = OTHER; note = 2'-deoxy-2'-fluoroadenosine-3'-phosphate
  modified_base 17: mod_base = OTHER; note = 2'-O-methylguanosine-3'-phosphate
  modified_base 18: mod_base = OTHER; note = 2'-O-methylcytidine-3'-phosphate
  modified_base 19: mod_base = OTHER; note = 2'-O-methylcytidine-3'-phosphate
  modified_base 20: mod_base = OTHER; note = 2'-O-methyladenosine-3'-phosphate
  modified_base 21: mod_base = OTHER; note = 2'-O-methyluridine-3'-phosphorothioate
  modified_base 22: mod_base = OTHER; note = 2'-O-methylguanosine-3'-phosphorothioate
  modified_base 23: mod_base = OTHER; note = 2'-O-methyluridine
acgggcatatctggaagccatgt

SEQ ID NO: 1038 - DNA, 23 bp, synthetic construct
  source 1..23: mol_type = other DNA
  modified_base 1: mod_base = OTHER; note = 2'-O-methyladenosine-3'-phosphorothioate
  modified_base 2: mod_base = OTHER; note = 2'-deoxy-2'-fluorocytidine-3'-phosphorothioate
  modified_base 3: mod_base = OTHER; note = 2'-O-methylguanosine-3'-phosphate
  modified_base 4: mod_base = OTHER; note = 2'-O-methylguanosine-3'-phosphate
  modified_base 6: mod_base = OTHER; note = 2'-O-methylcytidine-3'-phosphate
  modified_base 7: mod_base = OTHER; note = Adenosine-glycol nucleic acid (GNA), S-isomer
  modified_base 8: mod_base = OTHER; note = 2'-O-methyluridine-3'-phosphate
  modified_base 9: mod_base = OTHER; note = 2'-O-methyladenosine-3'-phosphate
  modified_base 10: mod_base = OTHER; note = 2'-O-methyluridine-3'-phosphate
  modified_base 11: mod_base = OTHER; note = 2'-O-methylcytidine-3'-phosphate
  modified_base 12: mod_base = OTHER; note = 2'-O-methyluridine-3'-phosphate
  modified_base 13: mod_base = OTHER; note = 2'-O-methylguanosine-3'-phosphate
  modified_base 14: mod_base = OTHER; note = 2'-deoxy-2'-fluoroguanosine-3'-phosphate
  modified_base 15: mod_base = OTHER; note = 2'-O-methyladenosine-3'-phosphate
  modified_base 16: mod_base = OTHER; note = 2'-deoxy-2'-fluoroadenosine-3'-phosphate
  modified_base 17: mod_base = OTHER; note = 2'-O-methylguanosine-3'-phosphate
  modified_base 18: mod_base = OTHER; note = 2'-O-methylcytidine-3'-phosphate
  modified_base 19: mod_base = OTHER; note = 2'-O-methylcytidine-3'-phosphate
  modified_base 20: mod_base = OTHER; note = 2'-O-methyladenosine-3'-phosphate
  modified_base 21: mod_base = OTHER; note = 2'-O-methyluridine-3'-phosphorothioate
  modified_base 22: mod_base = OTHER; note = 2'-O-methylguanosine-3'-phosphorothioate
  modified_base 23: mod_base = OTHER; note = 2'-O-methyluridine
  misc_feature 1..4: note = RNA
  misc_feature 6..23: note = RNA
  misc_feature 5: note = DNA
acgggcatatctggaagccatgt

SEQ ID NO: 1039 - RNA, 23 nt, synthetic construct
  source 1..23: mol_type = other RNA
  modified_base 1: mod_base = OTHER; note = 2'-O-methyladenosine-3'-phosphorothioate
  modified_base 2: mod_base = OTHER; note = 2'-deoxy-2'-fluorocytidine-3'-phosphorothioate
  modified_base 3: mod_base = OTHER; note = 2'-O-methylguanosine-3'-phosphate
  modified_base 4: mod_base = OTHER; note = 2'-O-methyluridine-3'-phosphate
  modified_base 5: mod_base = OTHER; note = 2'-O-methylcytidine-3'-phosphate
  modified_base 6: mod_base = OTHER; note = 2'-deoxy-2'-fluoroguanosine-3'-phosphate
  modified_base 7: mod_base = OTHER; note = 2'-O-methylguanosine-3'-phosphate
  modified_base 8: mod_base = OTHER; note = 2'-O-methylguanosine-3'-phosphate
  modified_base 9: mod_base = OTHER; note = 2'-O-methylcytidine-3'-phosphate
  modified_base 10: mod_base = OTHER; note = 2'-O-methyladenosine-3'-phosphate
  modified_base 11: mod_base = OTHER; note = 2'-O-methyluridine-3'-phosphate
  modified_base 12: mod_base = OTHER; note = 2'-O-methyladenosine-3'-phosphate
  modified_base 13: mod_base = OTHER; note = 2'-O-methyluridine-3'-phosphate
  modified_base 14: mod_base = OTHER; note = 2'-deoxy-2'-fluorocytidine-3'-phosphate
  modified_base 15: mod_base = OTHER; note = 2'-O-methyluridine-3'-phosphate
  modified_base 16: mod_base = OTHER; note = 2'-deoxy-2'-fluoroguanosine-3'-phosphate
  modified_base 17: mod_base = OTHER; note = 2'-O-methylguanosine-3'-phosphate
  modified_base 18: mod_base = OTHER; note = 2'-O-methyladenosine-3'-phosphate
  modified_base 19: mod_base = OTHER; note = 2'-O-methyladenosine-3'-phosphate
  modified_base 20: mod_base = OTHER; note = 2'-O-methylguanosine-3'-phosphate
  modified_base 21: mod_base = OTHER; note = 2'-O-methylcytidine-3'-phosphorothioate
  modified_base 22: mod_base = OTHER; note = 2'-O-methylcytidine-3'-phosphorothioate
  modified_base 23: mod_base = OTHER; note = 2'-O-methyladenosine
acgtcgggcatatctggaagcca

SEQ ID NO: 1040 - RNA, 23 nt, synthetic construct
  source 1..23: mol_type = other RNA
  modified_base 1: mod_base = OTHER; note = 2'-O-methyladenosine-3'-phosphorothioate
  modified_base 2: mod_base = OTHER; note = 2'-deoxy-2'-fluorocytidine-3'-phosphorothioate
  modified_base 3: mod_base = OTHER; note = 2'-O-methylcytidine-3'-phosphate
  modified_base 4: mod_base = OTHER; note = 2'-O-methyluridine-3'-phosphate
  modified_base 5: mod_base = OTHER; note = 2'-O-methylguanosine-3'-phosphate
  modified_base 6: mod_base = OTHER; note = 2'-deoxy-2'-fluorouridine-3'-phosphate
  modified_base 7: mod_base = OTHER; note = 2'-O-methylguanosine-3'-phosphate
  modified_base 8: mod_base = OTHER; note = 2'-O-methyladenosine-3'-phosphate
  modified_base 9: mod_base = OTHER; note = 2'-O-methylguanosine-3'-phosphate
  modified_base 10: mod_base = OTHER; note = 2'-O-methylguanosine-3'-phosphate
  modified_base 11: mod_base = OTHER; note = 2'-O-methyluridine-3'-phosphate
  modified_base 12: mod_base = OTHER; note = 2'-O-methylcytidine-3'-phosphate
  modified_base 13: mod_base = OTHER; note = 2'-O-methyladenosine-3'-phosphate
  modified_base 14: mod_base = OTHER; note = 2'-deoxy-2'-fluorocytidine-3'-phosphate
  modified_base 15: mod_base = OTHER; note = 2'-O-methylcytidine-3'-phosphate
  modified_base 16: mod_base = OTHER; note = 2'-deoxy-2'-fluorocytidine-3'-phosphate
  modified_base 17: mod_base = OTHER; note = 2'-O-methyladenosine-3'-phosphate
  modified_base 18: mod_base = OTHER; note = 2'-O-methylcytidine-3'-phosphate
  modified_base 19: mod_base = OTHER; note = 2'-O-methyluridine-3'-phosphate
  modified_base 20: mod_base = OTHER; note = 2'-O-methylguanosine-3'-phosphate
  modified_base 21: mod_base = OTHER; note = 2'-O-methylcytidine-3'-phosphorothioate
  modified_base 22: mod_base = OTHER; note = 2'-O-methyladenosine-3'-phosphorothioate
  modified_base 23: mod_base = OTHER; note = 2'-O-methyladenosine
acctgtgaggtcacccactgcaa

SEQ ID NO: 1041 - DNA, 23 bp, synthetic construct
  source 1..23: mol_type = other DNA
  modified_base 1: mod_base = OTHER; note = 2'-O-methyladenosine-3'-phosphorothioate
  modified_base 2: mod_base = OTHER; note = 2'-deoxy-2'-fluorouridine-3'-phosphorothioate
  modified_base 3: mod_base = OTHER; note = 2'-O-methylguanosine-3'-phosphate
  modified_base 4: mod_base = OTHER; note = 2'-O-methylguanosine-3'-phosphate
  modified_base 6: mod_base = OTHER; note = 2'-O-methyladenosine-3'-phosphate
  modified_base 7: mod_base = OTHER; note = Thymidine-glycol nucleic acid (GNA), S-Isomer
  modified_base 8: mod_base = OTHER; note = 2'-O-methyluridine-3'-phosphate
  modified_base 9: mod_base = OTHER; note = 2'-O-methyluridine-3'-phosphate
  modified_base 10: mod_base = OTHER; note = 2'-O-methylguanosine-3'-phosphate
  modified_base 11: mod_base = OTHER; note = 2'-O-methylguanosine-3'-phosphate
  modified_base 12: mod_base = OTHER; note = 2'-O-methylguanosine-3'-phosphate
  modified_base 13: mod_base = OTHER; note = 2'-O-methyladenosine-3'-phosphate
  modified_base 14: mod_base = OTHER; note = 2'-deoxy-2'-fluorocytidine-3'-phosphate
  modified_base 15: mod_base = OTHER; note = 2'-O-methylcytidine-3'-phosphate
  modified_base 16: mod_base = OTHER; note = 2'-deoxy-2'-fluorouridine-3'-phosphate
  modified_base 17: mod_base = OTHER; note = 2'-O-methylguanosine-3'-phosphate
  modified_base 18: mod_base = OTHER; note = 2'-O-methylguanosine-3'-phosphate
  modified_base 19: mod_base = OTHER; note = 2'-O-methyladenosine-3'-phosphate
  modified_base 20: mod_base = OTHER; note = 2'-O-methylguanosine-3'-phosphate
  modified_base 21: mod_base = OTHER; note = 2'-O-methylguanosine-3'-phosphorothioate
  modified_base 22: mod_base = OTHER; note = 2'-O-methylcytidine-3'-phosphorothioate
  modified_base 23: mod_base = OTHER; note = 2'-O-methylguanosine
  misc_feature 1..4: note = RNA
  misc_feature 6..23: note = RNA
  misc_feature 5: note = DNA
atggcatttgggacctggaggcg

SEQ ID NO: 1042 - RNA, 23 nt, synthetic construct
  source 1..23: mol_type = other RNA
  modified_base 1: mod_base = OTHER; note = 2'-O-methyladenosine-3'-phosphorothioate
  modified_base 2: mod_base = OTHER; note = 2'-deoxy-2'-fluorocytidine-3'-phosphorothioate
  modified_base 3: mod_base = OTHER; note = 2'-O-methyluridine-3'-phosphate
  modified_base 4: mod_base = OTHER; note = 2'-O-methylguanosine-3'-phosphate
  modified_base 5: mod_base = OTHER; note = 2'-O-methylguanosine-3'-phosphate
  modified_base 6: mod_base = OTHER; note = 2'-deoxy-2'-fluorocytidine-3'-phosphate
  modified_base 7: mod_base = OTHER; note = 2'-O-methyladenosine-3'-phosphate
  modified_base 8: mod_base = OTHER; note = 2'-O-methyluridine-3'-phosphate
  modified_base 9: mod_base = OTHER; note = 2'-O-methyluridine-3'-phosphate
  modified_base 10: mod_base = OTHER; note = 2'-O-methyluridine-3'-phosphate
  modified_base 11: mod_base = OTHER; note = 2'-O-methylguanosine-3'-phosphate
  modified_base 12: mod_base = OTHER; note = 2'-O-methylguanosine-3'-phosphate
  modified_base 13: mod_base = OTHER; note = 2'-O-methylguanosine-3'-phosphate
  modified_base 14: mod_base = OTHER; note = 2'-deoxy-2'-fluoroadenosine-3'-phosphate
  modified_base 15: mod_base = OTHER; note = 2'-O-methylcytidine-3'-phosphate
  modified_base 16: mod_base = OTHER; note = 2'-deoxy-2'-fluorocytidine-3'-phosphate
  modified_base 17: mod_base = OTHER; note = 2'-O-methyluridine-3'-phosphate
  modified_base 18: mod_base = OTHER; note = 2'-O-methylguanosine-3'-phosphate
  modified_base 19: mod_base = OTHER; note = 2'-O-methylguanosine-3'-phosphate
  modified_base 20: mod_base = OTHER; note = 2'-O-methyladenosine-3'-phosphate
  modified_base 21: mod_base = OTHER; note = 2'-O-methylguanosine-3'-phosphorothioate
  modified_base 22: mod_base = OTHER; note = 2'-O-methylguanosine-3'-phosphorothioate
  modified_base 23: mod_base = OTHER; note = 2'-O-methylcytidine
actggcatttgggacctggaggc

SEQ ID NO: 1043 - DNA, 23 bp, synthetic construct
  source 1..23: mol_type = other DNA
  modified_base 1: mod_base = OTHER; note = 2'-O-methyladenosine-3'-phosphorothioate
  modified_base 2: mod_base = OTHER; note = 2'-deoxy-2'-fluorocytidine-3'-phosphorothioate
  modified_base 3: mod_base = OTHER; note = 2'-O-methyluridine-3'-phosphate
  modified_base 4: mod_base = OTHER; note = 2'-O-methylguanosine-3'-phosphate
  modified_base 6: mod_base = OTHER; note = 2'-O-methylcytidine-3'-phosphate
  modified_base 7: mod_base = OTHER; note = Adenosine-glycol nucleic acid (GNA), S-isomer
  modified_base 8: mod_base = OTHER; note = 2'-O-methyluridine-3'-phosphate
  modified_base 9: mod_base = OTHER; note = 2'-O-methyluridine-3'-phosphate
  modified_base 10: mod_base = OTHER; note = 2'-O-methyluridine-3'-phosphate
  modified_base 11: mod_base = OTHER; note = 2'-O-methylguanosine-3'-phosphate
  modified_base 12: mod_base = OTHER; note = 2'-O-methylguanosine-3'-phosphate
  modified_base 13: mod_base = OTHER; note = 2'-O-methylguanosine-3'-phosphate
  modified_base 14: mod_base = OTHER; note = 2'-deoxy-2'-fluoroadenosine-3'-phosphate
  modified_base 15: mod_base = OTHER; note = 2'-O-methylcytidine-3'-phosphate
  modified_base 16: mod_base = OTHER; note = 2'-deoxy-2'-fluorocytidine-3'-phosphate
  modified_base 17: mod_base = OTHER; note = 2'-O-methyluridine-3'-phosphate
  modified_base 18: mod_base = OTHER; note = 2'-O-methylguanosine-3'-phosphate
  modified_base 19: mod_base = OTHER; note = 2'-O-methylguanosine-3'-phosphate
  modified_base 20: mod_base = OTHER; note = 2'-O-methyladenosine-3'-phosphate
  modified_base 21: mod_base = OTHER; note = 2'-O-methylguanosine-3'-phosphorothioate
  modified_base 22: mod_base = OTHER; note = 2'-O-methylguanosine-3'-phosphorothioate
  modified_base 23: mod_base = OTHER; note = 2'-O-methylcytidine
  misc_feature 1..4: note = RNA
  misc_feature 6..23: note = RNA
  misc_feature 5: note = DNA
actggcatttgggacctggaggc

SEQ ID NO: 1044 - RNA, 23 nt, synthetic construct
  source 1..23: mol_type = other RNA
  modified_base 1: mod_base = OTHER; note = 2'-O-methyladenosine-3'-phosphorothioate
  modified_base 2: mod_base = OTHER; note = 2'-deoxy-2'-fluorocytidine-3'-phosphorothioate
  modified_base 3: mod_base = OTHER; note = 2'-O-methyluridine-3'-phosphate
  modified_base 4: mod_base = OTHER; note = 2'-O-methylcytidine-3'-phosphate
  modified_base 5: mod_base = OTHER; note = 2'-O-methyladenosine-3'-phosphate
  modified_base 6: mod_base = OTHER; note = 2'-deoxy-2'-fluorocytidine-3'-phosphate
  modified_base 7: mod_base = OTHER; note = 2'-O-methyluridine-3'-phosphate
  modified_base 8: mod_base = OTHER; note = 2'-O-methylguanosine-3'-phosphate
  modified_base 9: mod_base = OTHER; note = 2'-O-methylguanosine-3'-phosphate
  modified_base 10: mod_base = OTHER; note = 2'-O-methylcytidine-3'-phosphate
  modified_base 11: mod_base = OTHER; note = 2'-O-methyladenosine-3'-phosphate
  modified_base 12: mod_base = OTHER; note = 2'-O-methyluridine-3'-phosphate
  modified_base 13: mod_base = OTHER; note = 2'-O-methyluridine-3'-phosphate
  modified_base 14: mod_base = OTHER; note = 2'-deoxy-2'-fluorouridine-3'-phosphate
  modified_base 15: mod_base = OTHER; note = 2'-O-methylguanosine-3'-phosphate
  modified_base 16: mod_base = OTHER; note = 2'-deoxy-2'-fluoroguanosine-3'-phosphate
  modified_base 17: mod_base = OTHER; note = 2'-O-methylguanosine-3'-phosphate
  modified_base 18: mod_base = OTHER; note = 2'-O-methyladenosine-3'-phosphate
  modified_base 19: mod_base = OTHER; note = 2'-O-methylcytidine-3'-phosphate
  modified_base 20: mod_base = OTHER; note = 2'-O-methylcytidine-3'-phosphate
  modified_base 21: mod_base = OTHER; note = 2'-O-methyluridine-3'-phosphorothioate
  modified_base 22: mod_base = OTHER; note = 2'-O-methylguanosine-3'-phosphorothioate
  modified_base 23: mod_base = OTHER; note = 2'-O-methylguanosine
actcactggcatttgggacctgg

SEQ ID NO: 1045 - DNA, 23 bp, synthetic construct
  source 1..23: mol_type = other DNA
  modified_base 1: mod_base = OTHER; note = 2'-O-methyladenosine-3'-phosphorothioate
  modified_base 2: mod_base = OTHER; note = 2'-deoxy-2'-fluorouridine-3'-phosphorothioate
  modified_base 3: mod_base = OTHER; note = 2'-O-methylguanosine-3'-phosphate
  modified_base 4: mod_base = OTHER; note = 2'-O-methylcytidine-3'-phosphate
  modified_base 6: mod_base = OTHER; note = 2'-O-methylcytidine-3'-phosphate
  modified_base 7: mod_base = OTHER; note = Adenosine-glycol nucleic acid (GNA), S-isomer
  modified_base 8: mod_base = OTHER; note = 2'-O-methylcytidine-3'-phosphate
  modified_base 9: mod_base = OTHER; note = 2'-O-methyluridine-3'-phosphate
  modified_base 10: mod_base = OTHER; note = 2'-O-methylguanosine-3'-phosphate
  modified_base 11: mod_base = OTHER; note = 2'-O-methylguanosine-3'-phosphate
  modified_base 12: mod_base = OTHER; note = 2'-O-methylcytidine-3'-phosphate
  modified_base 13: mod_base = OTHER; note = 2'-O-methyladenosine-3'-phosphate
  modified_base 14: mod_base = OTHER; note = 2'-deoxy-2'-fluorouridine-3'-phosphate
  modified_base 15: mod_base = OTHER; note = 2'-O-methyluridine-3'-phosphate
  modified_base 16: mod_base = OTHER; note = 2'-deoxy-2'-fluorouridine-3'-phosphate
  modified_base 17: mod_base = OTHER; note = 2'-O-methylguanosine-3'-phosphate
  modified_base 18: mod_base = OTHER; note = 2'-O-methylguanosine-3'-phosphate
  modified_base 19: mod_base = OTHER; note = 2'-O-methylguanosine-3'-phosphate
  modified_base 20: mod_base = OTHER; note = 2'-O-methyladenosine-3'-phosphate
  modified_base 21: mod_base = OTHER; note = 2'-O-methylcytidine-3'-phosphorothioate
  modified_base 22: mod_base = OTHER; note = 2'-O-methylcytidine-3'-phosphorothioate
  modified_base 23: mod_base = OTHER; note = 2'-O-methyluridine
  misc_feature 1..4: note = RNA
  misc_feature 6..23: note = RNA
  misc_feature 5: note = DNA
atgctcactggcatttgggacct

SEQ ID NO: 1046 - DNA, 23 bp, synthetic construct
  source 1..23: mol_type = other DNA
  modified_base 1: mod_base = OTHER; note = 2'-O-methyladenosine-3'-phosphorothioate
  modified_base 2: mod_base = OTHER; note = 2'-deoxy-2'-fluoroadenosine-3'-phosphorothioate
  modified_base 3: mod_base = OTHER; note = 2'-O-methylguanosine-3'-phosphate
  modified_base 4: mod_base = OTHER; note = 2'-O-methyluridine-3'-phosphate
  modified_base 6: mod_base = OTHER; note = 2'-O-methylcytidine-3'-phosphate
  modified_base 7: mod_base = OTHER; note = Adenosine-glycol nucleic acid (GNA), S-isomer
  modified_base 8: mod_base = OTHER; note = 2'-O-methylguanosine-3'-phosphate
  modified_base 9: mod_base = OTHER; note = 2'-O-methylguanosine-3'-phosphate
  modified_base 10: mod_base = OTHER; note = 2'-O-methylcytidine-3'-phosphate
  modified_base 11: mod_base = OTHER; note = 2'-O-methyluridine-3'-phosphate
  modified_base 12: mod_base = OTHER; note = 2'-O-methylguanosine-3'-phosphate
  modified_base 13: mod_base = OTHER; note = 2'-O-methylguanosine-3'-phosphate
  modified_base 14: mod_base = OTHER; note = 2'-deoxy-2'-fluoroadenosine-3'-phosphate
  modified_base 15: mod_base = OTHER; note = 2'-O-methylcytidine-3'-phosphate
  modified_base 16: mod_base = OTHER; note = 2'-deoxy-2'-fluorocytidine-3'-phosphate
  modified_base 17: mod_base = OTHER; note = 2'-O-methyluridine-3'-phosphate
  modified_base 18: mod_base = OTHER; note = 2'-O-methylguanosine-3'-phosphate
  modified_base 19: mod_base = OTHER; note = 2'-O-methyladenosine-3'-phosphate
  modified_base 20: mod_base = OTHER; note = 2'-O-methylguanosine-3'-phosphate
  modified_base 21: mod_base = OTHER; note = 2'-O-methylguanosine-3'-phosphorothioate
  modified_base 22: mod_base = OTHER; note = 2'-O-methyladenosine-3'-phosphorothioate
  modified_base 23: mod_base = OTHER; note = 2'-O-methyluridine
  misc_feature 1..4: note = RNA
  misc_feature 6..23: note = RNA
  misc_feature 5: note = DNA
aagttcaggctggacctgaggat

SEQ ID NO: 1047 - RNA, 23 nt, synthetic construct
  source 1..23: mol_type = other RNA
  modified_base 1: mod_base = OTHER; note = 2'-O-methyladenosine-3'-phosphorothioate
  modified_base 2: mod_base = OTHER; note = 2'-deoxy-2'-fluoroguanosine-3'-phosphorothioate
  modified_base 3: mod_base = OTHER; note = 2'-O-methyladenosine-3'-phosphate
  modified_base 4: mod_base = OTHER; note = 2'-O-methyladenosine-3'-phosphate
  modified_base 5: mod_base = OTHER; note = 2'-O-methylguanosine-3'-phosphate
  modified_base 6: mod_base = OTHER; note = 2'-deoxy-2'-fluorouridine-3'-phosphate
  modified_base 7: mod_base = OTHER; note = 2'-O-methyluridine-3'-phosphate
  modified_base 8: mod_base = OTHER; note = 2'-O-methylcytidine-3'-phosphate
  modified_base 9: mod_base = OTHER; note = 2'-O-methyladenosine-3'-phosphate
  modified_base 10: mod_base = OTHER; note = 2'-O-methylguanosine-3'-phosphate
  modified_base 11: mod_base = OTHER; note = 2'-O-methylguanosine-3'-phosphate
  modified_base 12: mod_base = OTHER; note = 2'-O-methylcytidine-3'-phosphate
  modified_base 13: mod_base = OTHER; note = 2'-O-methyluridine-3'-phosphate
  modified_base 14: mod_base = OTHER; note = 2'-deoxy-2'-fluoroguanosine-3'-phosphate
  modified_base 15: mod_base = OTHER; note = 2'-O-methylguanosine-3'-phosphate
  modified_base 16: mod_base = OTHER; note = 2'-deoxy-2'-fluoroadenosine-3'-phosphate
  modified_base 17: mod_base = OTHER; note = 2'-O-methylcytidine-3'-phosphate
  modified_base 18: mod_base = OTHER; note = 2'-O-methylcytidine-3'-phosphate
  modified_base 19: mod_base = OTHER; note = 2'-O-methyluridine-3'-phosphate
  modified_base 20: mod_base = OTHER; note = 2'-O-methylguanosine-3'-phosphate
  modified_base 21: mod_base = OTHER; note = 2'-O-methyladenosine-3'-phosphorothioate
  modified_base 22: mod_base = OTHER; note = 2'-O-methylguanosine-3'-phosphorothioate
  modified_base 23: mod_base = OTHER; note = 2'-O-methylguanosine
agaagttcaggctggacctgagg

SEQ ID NO: 1048 - DNA, 23 bp, synthetic construct
  source 1..23: mol_type = other DNA
  modified_base 1: mod_base = OTHER; note = 2'-O-methyladenosine-3'-phosphorothioate
  modified_base 2: mod_base = OTHER; note = 2'-deoxy-2'-fluoroguanosine-3'-phosphorothioate
  modified_base 3: mod_base = OTHER; note = 2'-O-methyladenosine-3'-phosphate
  modified_base 4: mod_base = OTHER; note = 2'-O-methyladenosine-3'-phosphate
  modified_base 6: mod_base = OTHER; note = 2'-O-methyluridine-3'-phosphate
  modified_base 7: mod_base = OTHER; note = Thymidine-glycol nucleic acid (GNA), S-Isomer
  modified_base 8: mod_base = OTHER; note = 2'-O-methylcytidine-3'-phosphate
  modified_base 9: mod_base = OTHER; note = 2'-O-methyladenosine-3'-phosphate
  modified_base 10: mod_base = OTHER; note = 2'-O-methylguanosine-3'-phosphate
  modified_base 11: mod_base = OTHER; note = 2'-O-methylguanosine-3'-phosphate
  modified_base 12: mod_base = OTHER; note = 2'-O-methylcytidine-3'-phosphate
  modified_base 13: mod_base = OTHER; note = 2'-O-methyluridine-3'-phosphate
  modified_base 14: mod_base = OTHER; note = 2'-deoxy-2'-fluoroguanosine-3'-phosphate
  modified_base 15: mod_base = OTHER; note = 2'-O-methylguanosine-3'-phosphate
  modified_base 16: mod_base = OTHER; note = 2'-deoxy-2'-fluoroadenosine-3'-phosphate
  modified_base 17: mod_base = OTHER; note = 2'-O-methylcytidine-3'-phosphate
  modified_base 18: mod_base = OTHER; note = 2'-O-methylcytidine-3'-phosphate
  modified_base 19: mod_base = OTHER; note = 2'-O-methyluridine-3'-phosphate
  modified_base 20: mod_base = OTHER; note = 2'-O-methylguanosine-3'-phosphate
  modified_base 21: mod_base = OTHER; note = 2'-O-methyladenosine-3'-phosphorothioate
  modified_base 22: mod_base = OTHER; note = 2'-O-methylguanosine-3'-phosphorothioate
  modified_base 23: mod_base = OTHER; note = 2'-O-methylguanosine
  misc_feature 1..4: note = RNA
  misc_feature 6..23: note = RNA
  misc_feature 5: note = DNA
agaagttcaggctggacctgagg

SEQ ID NO: 1049 - DNA, 23 bp, synthetic construct
  source 1..23: mol_type = other DNA
  modified_base 1: mod_base = OTHER; note = 2'-O-methyladenosine-3'-phosphorothioate
  modified_base 2: mod_base = OTHER; note = 2'-deoxy-2'-fluoroadenosine-3'-phosphorothioate
  modified_base 3: mod_base = OTHER; note = 2'-O-methylguanosine-3'-phosphate
  modified_base 4: mod_base = OTHER; note = 2'-O-methyladenosine-3'-phosphate
  modified_base 6: mod_base = OTHER; note = 2'-O-methylguanosine-3'-phosphate
  modified_base 7: mod_base = OTHER; note = Thymidine-glycol nucleic acid (GNA), S-Isomer
  modified_base 8: mod_base = OTHER; note = 2'-O-methyluridine-3'-phosphate
  modified_base 9: mod_base = OTHER; note = 2'-O-methylcytidine-3'-phosphate
  modified_base 10: mod_base = OTHER; note = 2'-O-methyladenosine-3'-phosphate
  modified_base 11: mod_base = OTHER; note = 2'-O-methylguanosine-3'-phosphate
  modified_base 12: mod_base = OTHER; note = 2'-O-methylguanosine-3'-phosphate
  modified_base 13: mod_base = OTHER; note = 2'-O-methylcytidine-3'-phosphate
  modified_base 14: mod_base = OTHER; note = 2'-deoxy-2'-fluorouridine-3'-phosphate
  modified_base 15: mod_base = OTHER; note = 2'-O-methylguanosine-3'-phosphate
  modified_base 16: mod_base = OTHER; note = 2'-deoxy-2'-fluoroguanosine-3'-phosphate
  modified_base 17: mod_base = OTHER; note = 2'-O-methyladenosine-3'-phosphate
  modified_base 18: mod_base = OTHER; note = 2'-O-methylcytidine-3'-phosphate
  modified_base 19: mod_base = OTHER; note = 2'-O-methylcytidine-3'-phosphate
  modified_base 20: mod_base = OTHER; note = 2'-O-methyluridine-3'-phosphate
  modified_base 21: mod_base = OTHER; note = 2'-O-methylguanosine-3'-phosphorothioate
  modified_base 22: mod_base = OTHER; note = 2'-O-methyladenosine-3'-phosphorothioate
  modified_base 23: mod_base = OTHER; note = 2'-O-methylguanosine
  misc_feature 1..4: note = RNA
  misc_feature 6..23: note = RNA
  misc_feature 5: note = DNA
aagaagttcaggctggacctgag

SEQ ID NO: 1050 - RNA, 23 nt, synthetic construct
  source 1..23: mol_type = other RNA
  modified_base 1: mod_base = OTHER; note = 2'-O-methyladenosine-3'-phosphorothioate
  modified_base 2: mod_base = OTHER; note = 2'-deoxy-2'-fluoroadenosine-3'-phosphorothioate
  modified_base 3: mod_base = OTHER; note = 2'-O-methyladenosine-3'-phosphate
  modified_base 4: mod_base = OTHER; note = 2'-O-methylguanosine-3'-phosphate
  modified_base 5: mod_base = OTHER; note = 2'-O-methyladenosine-3'-phosphate
  modified_base 6: mod_base = OTHER; note = 2'-deoxy-2'-fluoroadenosine-3'-phosphate
  modified_base 7: mod_base = OTHER; note = 2'-O-methylguanosine-3'-phosphate
  modified_base 8: mod_base = OTHER; note = 2'-O-methyluridine-3'-phosphate
  modified_base 9: mod_base = OTHER; note = 2'-O-methyluridine-3'-phosphate
  modified_base 10: mod_base = OTHER; note = 2'-O-methylcytidine-3'-phosphate
  modified_base 11: mod_base = OTHER; note = 2'-O-methyladenosine-3'-phosphate
  modified_base 12: mod_base = OTHER; note = 2'-O-methylguanosine-3'-phosphate
  modified_base 13: mod_base = OTHER; note = 2'-O-methylguanosine-3'-phosphate
  modified_base 14: mod_base = OTHER; note = 2'-deoxy-2'-fluorocytidine-3'-phosphate
  modified_base 15: mod_base = OTHER; note = 2'-O-methyluridine-3'-phosphate
  modified_base 16: mod_base = OTHER; note = 2'-deoxy-2'-fluoroguanosine-3'-phosphate
  modified_base 17: mod_base = OTHER; note = 2'-O-methylguanosine-3'-phosphate
  modified_base 18: mod_base = OTHER; note = 2'-O-methyladenosine-3'-phosphate
  modified_base 19: mod_base = OTHER; note = 2'-O-methylcytidine-3'-phosphate
  modified_base 20: mod_base = OTHER; note = 2'-O-methylcytidine-3'-phosphate
  modified_base 21: mod_base = OTHER; note = 2'-O-methyluridine-3'-phosphorothioate
  modified_base 22: mod_base = OTHER; note = 2'-O-methylguanosine-3'-phosphorothioate
  modified_base 23: mod_base = OTHER; note = 2'-O-methyladenosine
aaagaagttcaggctggacctga

SEQ ID NO: 1051 - RNA, 23 nt, synthetic construct
  source 1..23: mol_type = other RNA
  modified_base 1: mod_base = OTHER; note = 2'-O-methyladenosine-3'-phosphorothioate
  modified_base 2: mod_base = OTHER; note = 2'-deoxy-2'-fluoroguanosine-3'-phosphorothioate
  modified_base 3: mod_base = OTHER; note = 2'-O-methyladenosine-3'-phosphate
  modified_base 4: mod_base = OTHER; note = 2'-O-methyladenosine-3'-phosphate
  modified_base 5: mod_base = OTHER; note = 2'-O-methylguanosine-3'-phosphate
  modified_base 6: mod_base = OTHER; note = 2'-deoxy-2'-fluoroadenosine-3'-phosphate
  modified_base 7: mod_base = OTHER; note = 2'-O-methyladenosine-3'-phosphate
  modified_base 8: mod_base = OTHER; note = 2'-O-methylguanosine-3'-phosphate
  modified_base 9: mod_base = OTHER; note = 2'-O-methyluridine-3'-phosphate
  modified_base 10: mod_base = OTHER; note = 2'-O-methyluridine-3'-phosphate
  modified_base 11: mod_base = OTHER; note = 2'-O-methylcytidine-3'-phosphate
  modified_base 12: mod_base = OTHER; note = 2'-O-methyladenosine-3'-phosphate
  modified_base 13: mod_base = OTHER; note = 2'-O-methylguanosine-3'-phosphate
  modified_base 14: mod_base = OTHER; note = 2'-deoxy-2'-fluoroguanosine-3'-phosphate
  modified_base 15: mod_base = OTHER; note = 2'-O-methylcytidine-3'-phosphate
  modified_base 16: mod_base = OTHER; note = 2'-deoxy-2'-fluorouridine-3'-phosphate
  modified_base 17: mod_base = OTHER; note = 2'-O-methylguanosine-3'-phosphate
  modified_base 18: mod_base = OTHER; note = 2'-O-methylguanosine-3'-phosphate
  modified_base 19: mod_base = OTHER; note = 2'-O-methyladenosine-3'-phosphate
  modified_base 20: mod_base = OTHER; note = 2'-O-methylcytidine-3'-phosphate
  modified_base 21: mod_base = OTHER; note = 2'-O-methylcytidine-3'-phosphorothioate
  modified_base 22: mod_base = OTHER; note = 2'-O-methyluridine-3'-phosphorothioate
  modified_base 23: mod_base = OTHER; note = 2'-O-methylguanosine
agaagaagttcaggctggacctg

SEQ ID NO: 1052 - DNA, 23 bp, synthetic construct
  source 1..23: mol_type = other DNA
  modified_base 1: mod_base = OTHER; note = 2'-O-methyladenosine-3'-phosphorothioate
  modified_base 2: mod_base = OTHER; note = 2'-deoxy-2'-fluoroguanosine-3'-phosphorothioate
  modified_base 3: mod_base = OTHER; note = 2'-O-methylcytidine-3'-phosphate
  modified_base 4: mod_base = OTHER; note = 2'-O-methyladenosine-3'-phosphate
  modified_base 6: mod_base = OTHER; note = 2'-O-methylguanosine-3'-phosphate
  modified_base 7: mod_base = OTHER; note = Thymidine-glycol nucleic acid (GNA), S-Isomer
  modified_base 8: mod_base = OTHER; note = 2'-O-methyladenosine-3'-phosphate
  modified_base 9: mod_base = OTHER; note = 2'-O-methylcytidine-3'-phosphate
  modified_base 10: mod_base = OTHER; note = 2'-O-methyluridine-3'-phosphate
  modified_base 11: mod_base = OTHER; note = 2'-O-methyluridine-3'-phosphate
  modified_base 12: mod_base = OTHER; note = 2'-O-methyluridine-3'-phosphate
  modified_base 13: mod_base = OTHER; note = 2'-O-methyladenosine-3'-phosphate
  modified_base 14: mod_base = OTHER; note = 2'-deoxy-2'-fluorouridine-3'-phosphate
  modified_base 15: mod_base = OTHER; note = 2'-O-methyluridine-3'-phosphate
  modified_base 16: mod_base = OTHER; note = 2'-deoxy-2'-fluoroguanosine-3'-phosphate
  modified_base 17: mod_base = OTHER; note = 2'-O-methylcytidine-3'-phosphate
  modified_base 18: mod_base = OTHER; note = 2'-O-methylcytidine-3'-phosphate
  modified_base 19: mod_base = OTHER; note = 2'-O-methylcytidine-3'-phosphate
  modified_base 20: mod_base = OTHER; note = 2'-O-methyladenosine-3'-phosphate
  modified_base 21: mod_base = OTHER; note = 2'-O-methyladenosine-3'-phosphorothioate
  modified_base 22: mod_base = OTHER; note = 2'-O-methylguanosine-3'-phosphorothioate
  modified_base 23: mod_base = OTHER; note = 2'-O-methyladenosine
  misc_feature 1..4: note = RNA
  misc_feature 6..23: note = RNA
  misc_feature 5: note = DNA
agcaggtactttattgcccaaga

SEQ ID NO: 1053 - RNA, 23 nt, synthetic construct
  source 1..23: mol_type = other RNA
  modified_base 1: mod_base = OTHER; note = 2'-O-methyladenosine-3'-phosphorothioate
  modified_base 2: mod_base = OTHER; note = 2'-deoxy-2'-fluorocytidine-3'-phosphorothioate
  modified_base 3: mod_base = OTHER; note = 2'-O-methylcytidine-3'-phosphate
  modified_base 4: mod_base = OTHER; note = 2'-O-methyladenosine-3'-phosphate
  modified_base 5: mod_base = OTHER; note = 2'-O-methylguanosine-3'-phosphate
  modified_base 6: mod_base = OTHER; note = 2'-deoxy-2'-fluorocytidine-3'-phosphate
  modified_base 7: mod_base = OTHER; note = 2'-O-methyladenosine-3'-phosphate
  modified_base 8: mod_base = OTHER; note = 2'-O-methylguanosine-3'-phosphate
  modified_base 9: mod_base = OTHER; note = 2'-O-methylguanosine-3'-phosphate
  modified_base 10: mod_base = OTHER; note = 2'-O-methyluridine-3'-phosphate
  modified_base 11: mod_base = OTHER; note = 2'-O-methyladenosine-3'-phosphate
  modified_base 12: mod_base = OTHER; note = 2'-O-methylcytidine-3'-phosphate
  modified_base 13: mod_base = OTHER; note = 2'-O-methyluridine-3'-phosphate
  modified_base 14: mod_base = OTHER; note = 2'-deoxy-2'-fluorouridine-3'-phosphate
  modified_base 15: mod_base = OTHER; note = 2'-O-methyluridine-3'-phosphate
  modified_base 16: mod_base = OTHER; note = 2'-deoxy-2'-fluoroadenosine-3'-phosphate
  modified_base 17: mod_base = OTHER; note = 2'-O-methyluridine-3'-phosphate
  modified_base 18: mod_base = OTHER; note = 2'-O-methyluridine-3'-phosphate
  modified_base 19: mod_base = OTHER; note = 2'-O-methylguanosine-3'-phosphate
  modified_base 20: mod_base = OTHER; note = 2'-O-methylcytidine-3'-phosphate
  modified_base 21: mod_base = OTHER; note = 2'-O-methylcytidine-3'-phosphorothioate
  modified_base 22: mod_base = OTHER; note = 2'-O-methylcytidine-3'-phosphorothioate
  modified_base 23: mod_base = OTHER; note = 2'-O-methyladenosine
accagcaggtactttattgccca

SEQ ID NO: 1054 - RNA, 23 nt, synthetic construct
  source 1..23: mol_type = other RNA
  modified_base 1: mod_base = OTHER; note = 2'-O-methyladenosine-3'-phosphorothioate
  modified_base 2: mod_base = OTHER; note = 2'-deoxy-2'-fluoroguanosine-3'-phosphorothioate
  modified_base 3: mod_base = OTHER; note = 2'-O-methylcytidine-3'-phosphate
  modified_base 4: mod_base = OTHER; note = 2'-O-methyladenosine-3'-phosphate
  modified_base 5: mod_base = OTHER; note = 2'-O-methylcytidine-3'-phosphate
  modified_base 6: mod_base = OTHER; note = 2'-deoxy-2'-fluorocytidine-3'-phosphate
  modified_base 7: mod_base = OTHER; note = 2'-O-methyladenosine-3'-phosphate
  modified_base 8: mod_base = OTHER; note = 2'-O-methylguanosine-3'-phosphate
  modified_base 9: mod_base = OTHER; note = 2'-O-methylcytidine-3'-phosphate
  modified_base 10: mod_base = OTHER; note = 2'-O-methyladenosine-3'-phosphate
  modified_base 11: mod_base = OTHER; note = 2'-O-methylguanosine-3'-phosphate
  modified_base 12: mod_base = OTHER; note = 2'-O-methylguanosine-3'-phosphate
  modified_base 13: mod_base = OTHER; note = 2'-O-methyluridine-3'-phosphate
  modified_base 14: mod_base = OTHER; note = 2'-deoxy-2'-fluoroadenosine-3'-phosphate
  modified_base 15: mod_base = OTHER; note = 2'-O-methylcytidine-3'-phosphate
  modified_base 16: mod_base = OTHER; note = 2'-deoxy-2'-fluorouridine-3'-phosphate
  modified_base 17: mod_base = OTHER; note = 2'-O-methyluridine-3'-phosphate
  modified_base 18: mod_base = OTHER; note = 2'-O-methyluridine-3'-phosphate
  modified_base 19: mod_base = OTHER; note = 2'-O-methyladenosine-3'-phosphate
  modified_base 20: mod_base = OTHER; note = 2'-O-methyluridine-3'-phosphate
  modified_base 21: mod_base = OTHER; note = 2'-O-methyluridine-3'-phosphorothioate
  modified_base 22: mod_base = OTHER; note = 2'-O-methylguanosine-3'-phosphorothioate
  modified_base 23: mod_base = OTHER; note = 2'-O-methylcytidine
agcaccagcaggtactttattgc

SEQ ID NO: 1055 - DNA, 23 bp, synthetic construct
  source 1..23: mol_type = other DNA
  modified_base 1: mod_base = OTHER; note = 2'-O-methyladenosine-3'-phosphorothioate
  modified_base 2: mod_base = OTHER; note = 2'-deoxy-2'-fluoroguanosine-3'-phosphorothioate
  modified_base 3: mod_base = OTHER; note = 2'-O-methylcytidine-3'-phosphate
  modified_base 4: mod_base = OTHER; note = 2'-O-methyladenosine-3'-phosphate
  modified_base 6: mod_base = OTHER; note = 2'-O-methylcytidine-3'-phosphate
  modified_base 7: mod_base = OTHER; note = Adenosine-glycol nucleic acid (GNA), S-isomer
  modified_base 8: mod_base = OTHER; note = 2'-O-methylguanosine-3'-phosphate
  modified_base 9: mod_base = OTHER; note = 2'-O-methylcytidine-3'-phosphate
  modified_base 10: mod_base = OTHER; note = 2'-O-methyladenosine-3'-phosphate
  modified_base 11: mod_base = OTHER; note = 2'-O-methylguanosine-3'-phosphate
  modified_base 12: mod_base = OTHER; note = 2'-O-methylguanosine-3'-phosphate
  modified_base 13: mod_base = OTHER; note = 2'-O-methyluridine-3'-phosphate
  modified_base 14: mod_base = OTHER; note = 2'-deoxy-2'-fluoroadenosine-3'-phosphate
  modified_base 15: mod_base = OTHER; note = 2'-O-methylcytidine-3'-phosphate
  modified_base 16: mod_base = OTHER; note = 2'-deoxy-2'-fluorouridine-3'-phosphate
  modified_base 17: mod_base = OTHER; note = 2'-O-methyluridine-3'-phosphate
  modified_base 18: mod_base = OTHER; note = 2'-O-methyluridine-3'-phosphate
  modified_base 19: mod_base = OTHER; note = 2'-O-methyladenosine-3'-phosphate
  modified_base 20: mod_base = OTHER; note = 2'-O-methyluridine-3'-phosphate
  modified_base 21: mod_base = OTHER; note = 2'-O-methyluridine-3'-phosphorothioate
  modified_base 22: mod_base = OTHER; note = 2'-O-methylguanosine-3'-phosphorothioate
  modified_base 23: mod_base = OTHER; note = 2'-O-methylcytidine
  misc_feature 1..4: note = RNA
  misc_feature 6..23: note = RNA
  misc_feature 5: note = DNA
agcaccagcaggtactttattgc

SEQ ID NO: 1056 - DNA, 23 bp, synthetic construct
  source 1..23: mol_type = other DNA
  modified_base 1: mod_base = OTHER; note = 2'-O-methyladenosine-3'-phosphorothioate
  modified_base 2: mod_base = OTHER; note = 2'-deoxy-2'-fluorouridine-3'-phosphorothioate
  modified_base 3: mod_base = OTHER; note = 2'-O-methylcytidine-3'-phosphate
  modified_base 4: mod_base = OTHER; note = 2'-O-methyladenosine-3'-phosphate
  modified_base 6: mod_base = OTHER; note = 2'-O-methylcytidine-3'-phosphate
  modified_base 7: mod_base = OTHER; note = Adenosine-glycol nucleic acid (GNA), S-isomer
  modified_base 8: mod_base = OTHER; note = 2'-O-methylcytidine-3'-phosphate
  modified_base 9: mod_base = OTHER; note = 2'-O-methylcytidine-3'-phosphate
  modified_base 10: mod_base = OTHER; note = 2'-O-methyladenosine-3'-phosphate
  modified_base 11: mod_base = OTHER; note = 2'-O-methylguanosine-3'-phosphate
  modified_base 12: mod_base = OTHER; note = 2'-O-methylcytidine-3'-phosphate
  modified_base 13: mod_base = OTHER; note = 2'-O-methyladenosine-3'-phosphate
  modified_base 14: mod_base = OTHER; note = 2'-deoxy-2'-fluoroguanosine-3'-phosphate
  modified_base 15: mod_base = OTHER; note = 2'-O-methylguanosine-3'-phosphate
  modified_base 16: mod_base = OTHER; note = 2'-deoxy-2'-fluorouridine-3'-phosphate
  modified_base 17: mod_base = OTHER; note = 2'-O-methyladenosine-3'-phosphate
  modified_base 18: mod_base = OTHER; note = 2'-O-methylcytidine-3'-phosphate
  modified_base 19: mod_base = OTHER; note = 2'-O-methyluridine-3'-phosphate
  modified_base 20: mod_base = OTHER; note = 2'-O-methyluridine-3'-phosphate
  modified_base 21: mod_base = OTHER; note = 2'-O-methyluridine-3'-phosphorothioate
  modified_base 22: mod_base = OTHER; note = 2'-O-methyladenosine-3'-phosphorothioate
  modified_base 23: mod_base = OTHER; note = 2'-O-methyluridine
  misc_feature 1..4: note = RNA
  misc_feature 6..23: note = RNA
  misc_feature 5: note = DNA
atcagcaccagcaggtactttat

SEQ ID NO: 1057 - RNA, 23 nt, synthetic construct
  source 1..23: mol_type = other RNA
  modified_base 1: mod_base = OTHER; note = 2'-O-methyladenosine-3'-phosphorothioate
  modified_base 2: mod_base = OTHER; note = 2'-deoxy-2'-fluorocytidine-3'-phosphorothioate
  modified_base 3: mod_base = OTHER; note = 2'-O-methyluridine-3'-phosphate
  modified_base 4: mod_base = OTHER; note = 2'-O-methyladenosine-3'-phosphate
  modified_base 5: mod_base = OTHER; note = 2'-O-methylguanosine-3'-phosphate
  modified_base 6: mod_base = OTHER; note = 2'-deoxy-2'-fluoroadenosine-3'-phosphate
  modified_base 7: mod_base = OTHER; note = 2'-O-methylcytidine-3'-phosphate
  modified_base 8: mod_base = OTHER; note = 2'-O-methyluridine-3'-phosphate
  modified_base 9: mod_base = OTHER; note = 2'-O-methylcytidine-3'-phosphate
  modified_base 10: mod_base = OTHER; note = 2'-O-methylguanosine-3'-phosphate
  modified_base 11: mod_base = OTHER; note = 2'-O-methylcytidine-3'-phosphate
  modified_base 12: mod_base = OTHER; note = 2'-O-methylcytidine-3'-phosphate
  modified_base 13: mod_base = OTHER; note = 2'-O-methyluridine-3'-phosphate
  modified_base 14: mod_base = OTHER; note = 2'-deoxy-2'-fluorocytidine-3'-phosphate
  modified_base 15: mod_base = OTHER; note = 2'-O-methylcytidine-3'-phosphate
  modified_base 16: mod_base = OTHER; note = 2'-deoxy-2'-fluorouridine-3'-phosphate
  modified_base 17: mod_base = OTHER; note = 2'-O-methylcytidine-3'-phosphate
  modified_base 18: mod_base = OTHER; note = 2'-O-methyladenosine-3'-phosphate
  modified_base 19: mod_base = OTHER; note = 2'-O-methyladenosine-3'-phosphate
  modified_base 20: mod_base = OTHER; note = 2'-O-methylguanosine-3'-phosphate
  modified_base 21: mod_base = OTHER; note = 2'-O-methyluridine-3'-phosphorothioate
  modified_base 22: mod_base = OTHER; note = 2'-O-methylguanosine-3'-phosphorothioate
  modified_base 23: mod_base = OTHER; note = 2'-O-methyladenosine
actagactcgcctcctcaagtga

SEQ ID NO: 1058 - DNA, 23 bp, synthetic construct
  source 1..23: mol_type = other DNA
  modified_base 1: mod_base = OTHER; note = 2'-O-methyladenosine-3'-phosphorothioate
  modified_base 2: mod_base = OTHER; note = 2'-deoxy-2'-fluoroguanosine-3'-phosphorothioate
  modified_base 3: mod_base = OTHER; note = 2'-O-methylcytidine-3'-phosphate
  modified_base 4: mod_base = OTHER; note = 2'-O-methyluridine-3'-phosphate
  modified_base 6: mod_base = OTHER; note = 2'-O-methylcytidine-3'-phosphate
  modified_base 7: mod_base = OTHER; note = Adenosine-glycol nucleic acid (GNA), S-isomer
  modified_base 8: mod_base = OTHER; note = 2'-O-methylcytidine-3'-phosphate
  modified_base 9: mod_base = OTHER; note = 2'-O-methyladenosine-3'-phosphate
  modified_base 10: mod_base = OTHER; note = 2'-O-methyladenosine-3'-phosphate
  modified_base 11: mod_base = OTHER; note = 2'-O-methyladenosine-3'-phosphate
  modified_base 12: mod_base = OTHER; note = 2'-O-methylguanosine-3'-phosphate
  modified_base 13: mod_base = OTHER; note = 2'-O-methyladenosine-3'-phosphate
  modified_base 14: mod_base = OTHER; note = 2'-deoxy-2'-fluorouridine-3'-phosphate
  modified_base 15: mod_base = OTHER; note = 2'-O-methylguanosine-3'-phosphate
  modified_base 16: mod_base = OTHER; note = 2'-deoxy-2'-fluoroguanosine-3'-phosphate
  modified_base 17: mod_base = OTHER; note = 2'-O-methylguanosine-3'-phosphate
  modified_base 18: mod_base = OTHER; note = 2'-O-methyladenosine-3'-phosphate
  modified_base 19: mod_base = OTHER; note = 2'-O-methyladenosine-3'-phosphate
  modified_base 20: mod_base = OTHER; note = 2'-O-methyladenosine-3'-phosphate
  modified_base 21: mod_base = OTHER; note = 2'-O-methylcytidine-3'-phosphorothioate
  modified_base 22: mod_base = OTHER; note = 2'-O-methyluridine-3'-phosphorothioate
  modified_base 23: mod_base = OTHER; note = 2'-O-methyluridine
  misc_feature 1..4: note = RNA
  misc_feature 6..23: note = RNA
  misc_feature 5: note = DNA
agctgcacaaagatgggaaactt

SEQ ID NO: 1059 - DNA, 23 bp, synthetic construct
  source 1..23: mol_type = other DNA
  modified_base 1: mod_base = OTHER; note = 2'-O-methyladenosine-3'-phosphorothioate
  modified_base 2: mod_base = OTHER; note = 2'-deoxy-2'-fluoroguanosine-3'-phosphorothioate
  modified_base 3: mod_base = OTHER; note = 2'-O-methyluridine-3'-phosphate
  modified_base 4: mod_base = OTHER; note = 2'-O-methyladenosine-3'-phosphate
  modified_base 6: mod_base = OTHER; note = 2'-O-methylcytidine-3'-phosphate
  modified_base 7: mod_base = OTHER; note = Thymidine-glycol nucleic acid (GNA), S-Isomer
  modified_base 8: mod_base = OTHER; note = 2'-O-methylguanosine-3'-phosphate
  modified_base 9: mod_base = OTHER; note = 2'-O-methylcytidine-3'-phosphate
  modified_base 10: mod_base = OTHER; note = 2'-O-methyladenosine-3'-phosphate
  modified_base 11: mod_base = OTHER; note = 2'-O-methylcytidine-3'-phosphate
  modified_base 12: mod_base = OTHER; note = 2'-O-methyladenosine-3'-phosphate
  modified_base 13: mod_base = OTHER; note = 2'-O-methyladenosine-3'-phosphate
  modified_base 14: mod_base = OTHER; note = 2'-deoxy-2'-fluoroadenosine-3'-phosphate
  modified_base 15: mod_base = OTHER; note = 2'-O-methylguanosine-3'-phosphate
  modified_base 16: mod_base = OTHER; note = 2'-deoxy-2'-fluoroadenosine-3'-phosphate
  modified_base 17: mod_base = OTHER; note = 2'-O-methyluridine-3'-phosphate
  modified_base 18: mod_base = OTHER; note = 2'-O-methylguanosine-3'-phosphate
  modified_base 19: mod_base = OTHER; note = 2'-O-methylguanosine-3'-phosphate
  modified_base 20: mod_base = OTHER; note = 2'-O-methylguanosine-3'-phosphate
  modified_base 21: mod_base = OTHER; note = 2'-O-methyladenosine-3'-phosphorothioate
  modified_base 22: mod_base = OTHER; note = 2'-O-methyladenosine-3'-phosphorothioate
  modified_base 23: mod_base = OTHER; note = 2'-O-methyladenosine
  misc_feature 1..4: note = RNA
  misc_feature 6..23: note = RNA
  misc_feature 5: note = DNA
agtagctgcacaaagatgggaaa

SEQ ID NO: 1060 - RNA, 23 nt, synthetic construct
  source 1..23: mol_type = other RNA
  modified_base 1: mod_base = OTHER; note = 2'-O-methyladenosine-3'-phosphorothioate
  modified_base 2: mod_base = OTHER; note = 2'-deoxy-2'-fluoroguanosine-3'-phosphorothioate
  modified_base 3: mod_base = OTHER; note = 2'-O-methyladenosine-3'-phosphate
  modified_base 4: mod_base = OTHER; note = 2'-O-methylguanosine-3'-phosphate
  modified_base 5: mod_base = OTHER; note = 2'-O-methylguanosine-3'-phosphate
  modified_base 6: mod_base = OTHER; note = 2'-deoxy-2'-fluorouridine-3'-phosphate
  modified_base 7: mod_base = OTHER; note = 2'-O-methyladenosine-3'-phosphate
  modified_base 8: mod_base = OTHER; note = 2'-O-methylguanosine-3'-phosphate
  modified_base 9: mod_base = OTHER; note = 2'-O-methylcytidine-3'-phosphate
  modified_base 10: mod_base = OTHER; note = 2'-O-methyluridine-3'-phosphate
  modified_base 11: mod_base = OTHER; note = 2'-O-methylguanosine-3'-phosphate
  modified_base 12: mod_base = OTHER; note = 2'-O-methylcytidine-3'-phosphate
  modified_base 13: mod_base = OTHER; note = 2'-O-methyladenosine-3'-phosphate
  modified_base 14: mod_base = OTHER; note = 2'-deoxy-2'-fluorocytidine-3'-phosphate
  modified_base 15: mod_base = OTHER; note = 2'-O-methyladenosine-3'-phosphate
  modified_base 16: mod_base = OTHER; note = 2'-deoxy-2'-fluoroadenosine-3'-phosphate
  modified_base 17: mod_base = OTHER; note = 2'-O-methyladenosine-3'-phosphate
  modified_base 18: mod_base = OTHER; note = 2'-O-methylguanosine-3'-phosphate
  modified_base 19: mod_base = OTHER; note = 2'-O-methyladenosine-3'-phosphate
  modified_base 20: mod_base = OTHER; note = 2'-O-methyluridine-3'-phosphate
  modified_base 21: mod_base = OTHER; note = 2'-O-methylguanosine-3'-phosphorothioate
  modified_base 22: mod_base = OTHER; note = 2'-O-methylguanosine-3'-phosphorothioate
  modified_base 23: mod_base = OTHER; note = 2'-O-methylguanosine
agaggtagctgcacaaagatggg

SEQ ID NO: 1061 - DNA, 23 bp, synthetic construct
  source 1..23: mol_type = other DNA
  modified_base 1: mod_base = OTHER; note = 2'-O-methyladenosine-3'-phosphorothioate
  modified_base 2: mod_base = OTHER; note = 2'-deoxy-2'-fluoroguanosine-3'-phosphorothioate
  modified_base 3: mod_base = OTHER; note = 2'-O-methyladenosine-3'-phosphate
  modified_base 4: mod_base = OTHER; note = 2'-O-methylguanosine-3'-phosphate
  modified_base 6: mod_base = OTHER; note = 2'-O-methyluridine-3'-phosphate
  modified_base 7: mod_base = OTHER; note = Adenosine-glycol nucleic acid (GNA), S-isomer
  modified_base 8: mod_base = OTHER; note = 2'-O-methylguanosine-3'-phosphate
  modified_base 9: mod_base = OTHER; note = 2'-O-methylcytidine-3'-phosphate
  modified_base 10: mod_base = OTHER; note = 2'-O-methyluridine-3'-phosphate
  modified_base 11: mod_base = OTHER; note = 2'-O-methylguanosine-3'-phosphate
  modified_base 12: mod_base = OTHER; note = 2'-O-methylcytidine-3'-phosphate
  modified_base 13: mod_base = OTHER; note = 2'-O-methyladenosine-3'-phosphate
  modified_base 14: mod_base = OTHER; note = 2'-deoxy-2'-fluorocytidine-3'-phosphate
  modified_base 15: mod_base = OTHER; note = 2'-O-methyladenosine-3'-phosphate
  modified_base 16: mod_base = OTHER; note = 2'-deoxy-2'-fluoroadenosine-3'-phosphate
  modified_base 17: mod_base = OTHER; note = 2'-O-methyladenosine-3'-phosphate
  modified_base 18: mod_base = OTHER; note = 2'-O-methylguanosine-3'-phosphate
  modified_base 19: mod_base = OTHER; note = 2'-O-methyladenosine-3'-phosphate
  modified_base 20: mod_base = OTHER; note = 2'-O-methyluridine-3'-phosphate
  modified_base 21: mod_base = OTHER; note = 2'-O-methylguanosine-3'-phosphorothioate
  modified_base 22: mod_base = OTHER; note = 2'-O-methylguanosine-3'-phosphorothioate
  modified_base 23: mod_base = OTHER; note = 2'-O-methylguanosine
  misc_feature 1..4: note = RNA
  misc_feature 6..23: note = RNA
  misc_feature 5: note = DNA
agaggtagctgcacaaagatggg

SEQ ID NO: 1062 - RNA, 23 nt, synthetic construct
  source 1..23: mol_type = other RNA
  modified_base 1: mod_base = OTHER; note = 2'-O-methyladenosine-3'-phosphorothioate
  modified_base 2: mod_base = OTHER; note = 2'-deoxy-2'-fluoroadenosine-3'-phosphorothioate
  modified_base 3: mod_base = OTHER; note = 2'-O-methyladenosine-3'-phosphate
  modified_base 4: mod_base = OTHER; note = 2'-O-methyluridine-3'-phosphate
  modified_base 5: mod_base = OTHER; note = 2'-O-methylguanosine-3'-phosphate
  modified_base 6: mod_base = OTHER; note = 2'-deoxy-2'-fluorocytidine-3'-phosphate
  modified_base 7: mod_base = OTHER; note = 2'-O-methylguanosine-3'-phosphate
  modified_base 8: mod_base = OTHER; note = 2'-O-methylguanosine-3'-phosphate
  modified_base 9: mod_base = OTHER; note = 2'-O-methyladenosine-3'-phosphate
  modified_base 10: mod_base = OTHER; note = 2'-O-methylguanosine-3'-phosphate
  modified_base 11: mod_base = OTHER; note = 2'-O-methylguanosine-3'-phosphate
  modified_base 12: mod_base = OTHER; note = 2'-O-methyluridine-3'-phosphate
  modified_base 13: mod_base = OTHER; note = 2'-O-methyladenosine-3'-phosphate
  modified_base 14: mod_base = OTHER; note = 2'-deoxy-2'-fluoroguanosine-3'-phosphate
  modified_base 15: mod_base = OTHER; note = 2'-O-methylcytidine-3'-phosphate
  modified_base 16: mod_base = OTHER; note = 2'-deoxy-2'-fluorouridine-3'-phosphate
  modified_base 17: mod_base = OTHER; note = 2'-O-methylguanosine-3'-phosphate
  modified_base 18: mod_base = OTHER; note = 2'-O-methylcytidine-3'-phosphate
  modified_base 19: mod_base = OTHER; note = 2'-O-methyladenosine-3'-phosphate
  modified_base 20: mod_base = OTHER; note = 2'-O-methylcytidine-3'-phosphate
  modified_base 21: mod_base = OTHER; note = 2'-O-methyladenosine-3'-phosphorothioate
  modified_base 22: mod_base = OTHER; note = 2'-O-methyladenosine-3'-phosphorothioate
  modified_base 23: mod_base = OTHER; note = 2'-O-methyladenosine
aaatgcggaggtagctgcacaaa

SEQ ID NO: 1063 - RNA, 23 nt, synthetic construct
  source 1..23: mol_type = other RNA
  modified_base 1: mod_base = OTHER; note = 2'-O-methyladenosine-3'-phosphorothioate
  modified_base 2: mod_base = OTHER; note = 2'-deoxy-2'-fluoroguanosine-3'-phosphorothioate
  modified_base 3: mod_base = OTHER; note = 2'-O-methylcytidine-3'-phosphate
  modified_base 4: mod_base = OTHER; note = 2'-O-methyladenosine-3'-phosphate
  modified_base 5: mod_base = OTHER; note = 2'-O-methyladenosine-3'-phosphate
  modified_base 6: mod_base = OTHER; note = 2'-deoxy-2'-fluorouridine-3'-phosphate
  modified_base 7: mod_base = OTHER; note = 2'-O-methylguanosine-3'-phosphate
  modified_base 8: mod_base = OTHER; note = 2'-O-methylcytidine-3'-phosphate
  modified_base 9: mod_base = OTHER; note = 2'-O-methylguanosine-3'-phosphate
  modified_base 10: mod_base = OTHER; note = 2'-O-methylguanosine-3'-phosphate
  modified_base 11: mod_base = OTHER; note = 2'-O-methyladenosine-3'-phosphate
  modified_base 12: mod_base = OTHER; note = 2'-O-methylguanosine-3'-phosphate
  modified_base 13: mod_base = OTHER; note = 2'-O-methylguanosine-3'-phosphate
  modified_base 14: mod_base = OTHER; note = 2'-deoxy-2'-fluorouridine-3'-phosphate
  modified_base 15: mod_base = OTHER; note = 2'-O-methyladenosine-3'-phosphate
  modified_base 16: mod_base = OTHER; note = 2'-deoxy-2'-fluoroguanosine-3'-phosphate
  modified_base 17: mod_base = OTHER; note = 2'-O-methylcytidine-3'-phosphate
  modified_base 18: mod_base = OTHER; note = 2'-O-methyluridine-3'-phosphate
  modified_base 19: mod_base = OTHER; note = 2'-O-methylguanosine-3'-phosphate
  modified_base 20: mod_base = OTHER; note = 2'-O-methylcytidine-3'-phosphate
  modified_base 21: mod_base = OTHER; note = 2'-O-methyladenosine-3'-phosphorothioate
  modified_base 22: mod_base = OTHER; note = 2'-O-methylcytidine-3'-phosphorothioate
  modified_base 23: mod_base = OTHER; note = 2'-O-methyladenosine
agcaatgcggaggtagctgcaca

SEQ ID NO: 1064 - DNA, 23 bp, synthetic construct
  source 1..23: mol_type = other DNA
  modified_base 1: mod_base = OTHER; note = 2'-O-methyladenosine-3'-phosphorothioate
  modified_base 2: mod_base = OTHER; note = 2'-deoxy-2'-fluoroguanosine-3'-phosphorothioate
  modified_base 3: mod_base = OTHER; note = 2'-O-methyladenosine-3'-phosphate
  modified_base 4: mod_base = OTHER; note = 2'-O-methyluridine-3'-phosphate
  modified_base 6: mod_base = OTHER; note = 2'-O-methylcytidine-3'-phosphate
  modified_base 7: mod_base = OTHER; note = Thymidine-glycol nucleic acid (GNA), S-Isomer
  modified_base 8: mod_base = OTHER; note = 2'-O-methylcytidine-3'-phosphate
  modified_base 9: mod_base = OTHER; note = 2'-O-methylcytidine-3'-phosphate
  modified_base 10: mod_base = OTHER; note = 2'-O-methyladenosine-3'-phosphate
  modified_base 11: mod_base = OTHER; note = 2'-O-methylcytidine-3'-phosphate
  modified_base 12: mod_base = OTHER; note = 2'-O-methylguanosine-3'-phosphate
  modified_base 13: mod_base = OTHER; note = 2'-O-methyluridine-3'-phosphate
  modified_base 14: mod_base = OTHER; note = 2'-deoxy-2'-fluorocytidine-3'-phosphate
  modified_base 15: mod_base = OTHER; note = 2'-O-methyladenosine-3'-phosphate
  modified_base 16: mod_base = OTHER; note = 2'-deoxy-2'-fluorocytidine-3'-phosphate
  modified_base 17: mod_base = OTHER; note = 2'-O-methyladenosine-3'-phosphate
  modified_base 18: mod_base = OTHER; note = 2'-O-methylguanosine-3'-phosphate
  modified_base 19: mod_base = OTHER; note = 2'-O-methylguanosine-3'-phosphate
  modified_base 20: mod_base = OTHER; note = 2'-O-methylcytidine-3'-phosphate
  modified_base 21: mod_base = OTHER; note = 2'-O-methyladenosine-3'-phosphorothioate
  modified_base 22: mod_base = OTHER; note = 2'-O-methylguanosine-3'-phosphorothioate
  modified_base 23: mod_base = OTHER; note = 2'-O-methylguanosine
  misc_feature 1..4: note = RNA
  misc_feature 6..23: note = RNA
  misc_feature 5: note = DNA
agatcctccacgtcacaggcagg

SEQ ID NO: 1065 - RNA, 23 nt, synthetic construct
  source 1..23: mol_type = other RNA
  modified_base 1: mod_base = OTHER; note = 2'-O-methyladenosine-3'-phosphorothioate
  modified_base 2: mod_base = OTHER; note = 2'-deoxy-2'-fluorocytidine-3'-phosphorothioate
  modified_base 3: mod_base = OTHER; note = 2'-O-methylcytidine-3'-phosphate
  modified_base 4: mod_base = OTHER; note = 2'-O-methyladenosine-3'-phosphate
  modified_base 5: mod_base = OTHER; note = 2'-O-methyladenosine-3'-phosphate
  modified_base 6: mod_base = OTHER; note = 2'-deoxy-2'-fluorocytidine-3'-phosphate
  modified_base 7: mod_base = OTHER; note = 2'-O-methyluridine-3'-phosphate
  modified_base 8: mod_base = OTHER; note = 2'-O-methylcytidine-3'-phosphate
  modified_base 9: mod_base = OTHER; note = 2'-O-methyladenosine-3'-phosphate
  modified_base 10: mod_base = OTHER; note = 2'-O-methylguanosine-3'-phosphate
  modified_base 11: mod_base = OTHER; note = 2'-O-methylcytidine-3'-phosphate
  modified_base 12: mod_base = OTHER; note = 2'-O-methyluridine-3'-phosphate
  modified_base 13: mod_base = OTHER; note = 2'-O-methylcytidine-3'-phosphate
  modified_base 14: mod_base = OTHER; note = 2'-deoxy-2'-fluoroadenosine-3'-phosphate
  modified_base 15: mod_base = OTHER; note = 2'-O-methylguanosine-3'-phosphate
  modified_base 16: mod_base = OTHER; note = 2'-deoxy-2'-fluoroadenosine-3'-phosphate
  modified_base 17: mod_base = OTHER; note = 2'-O-methylguanosine-3'-phosphate
  modified_base 18: mod_base = OTHER; note = 2'-O-methylguanosine-3'-phosphate
  modified_base 19: mod_base = OTHER; note = 2'-O-methylcytidine-3'-phosphate
  modified_base 20: mod_base = OTHER; note = 2'-O-methyluridine-3'-phosphate
  modified_base 21: mod_base = OTHER; note = 2'-O-methylguanosine-3'-phosphorothioate
  modified_base 22: mod_base = OTHER; note = 2'-O-methylguanosine-3'-phosphorothioate
  modified_base 23: mod_base = OTHER; note = 2'-O-methylguanosine
accaactcagctcagaggctggg

SEQ ID NO: 1066 - RNA, 23 nt, synthetic construct
  source 1..23: mol_type = other RNA
  modified_base 1: mod_base = OTHER; note = 2'-O-methyladenosine-3'-phosphorothioate
  modified_base 2: mod_base = OTHER; note = 2'-deoxy-2'-fluoroadenosine-3'-phosphorothioate
  modified_base 3: mod_base = OTHER; note = 2'-O-methylcytidine-3'-phosphate
  modified_base 4: mod_base = OTHER; note = 2'-O-methylcytidine-3'-phosphate
  modified_base 5: mod_base = OTHER; note = 2'-O-methyladenosine-3'-phosphate
  modified_base 6: mod_base = OTHER; note = 2'-deoxy-2'-fluoroadenosine-3'-phosphate
  modified_base 7: mod_base = OTHER; note = 2'-O-methylcytidine-3'-phosphate
  modified_base 8: mod_base = OTHER; note = 2'-O-methyluridine-3'-phosphate
  modified_base 9: mod_base = OTHER; note = 2'-O-methylcytidine-3'-phosphate
  modified_base 10: mod_base = OTHER; note = 2'-O-methyladenosine-3'-phosphate
  modified_base 11: mod_base = OTHER; note = 2'-O-methylguanosine-3'-phosphate
  modified_base 12: mod_base = OTHER; note = 2'-O-methylcytidine-3'-phosphate
  modified_base 13: mod_base = OTHER; note = 2'-O-methyluridine-3'-phosphate
  modified_base 14: mod_base = OTHER; note = 2'-deoxy-2'-fluorocytidine-3'-phosphate
  modified_base 15: mod_base = OTHER; note = 2'-O-methyladenosine-3'-phosphate
  modified_base 16: mod_base = OTHER; note = 2'-deoxy-2'-fluoroguanosine-3'-phosphate
  modified_base 17: mod_base = OTHER; note = 2'-O-methyladenosine-3'-phosphate
  modified_base 18: mod_base = OTHER; note = 2'-O-methylguanosine-3'-phosphate
  modified_base 19: mod_base = OTHER; note = 2'-O-methylguanosine-3'-phosphate
  modified_base 20: mod_base = OTHER; note = 2'-O-methylcytidine-3'-phosphate
  modified_base 21: mod_base = OTHER; note = 2'-O-methyluridine-3'-phosphorothioate
  modified_base 22: mod_base = OTHER; note = 2'-O-methylguanosine-3'-phosphorothioate
  modified_base 23: mod_base = OTHER; note = 2'-O-methylguanosine
aaccaactcagctcagaggctgg

SEQ ID NO: 1067 - RNA, 23 nt, synthetic construct
  source 1..23: mol_type = other RNA
  modified_base 1: mod_base = OTHER; note = 2'-O-methyladenosine-3'-phosphorothioate
  modified_base 2: mod_base = OTHER; note = 2'-deoxy-2'-fluoroadenosine-3'-phosphorothioate
  modified_base 3: mod_base = OTHER; note = 2'-O-methyladenosine-3'-phosphate
  modified_base 4: mod_base = OTHER; note = 2'-O-methylcytidine-3'-phosphate
  modified_base 5: mod_base = OTHER; note = 2'-O-methylcytidine-3'-phosphate
  modified_base 6: mod_base = OTHER; note = 2'-deoxy-2'-fluoroadenosine-3'-phosphate
  modified_base 7: mod_base = OTHER; note = 2'-O-methyladenosine-3'-phosphate
  modified_base 8: mod_base = OTHER; note = 2'-O-methylcytidine-3'-phosphate
  modified_base 9: mod_base = OTHER; note = 2'-O-methyluridine-3'-phosphate
  modified_base 10: mod_base = OTHER; note = 2'-O-methylcytidine-3'-phosphate
  modified_base 11: mod_base = OTHER; note = 2'-O-methyladenosine-3'-phosphate
  modified_base 12: mod_base = OTHER; note = 2'-O-methylguanosine-3'-phosphate
  modified_base 13: mod_base = OTHER; note = 2'-O-methylcytidine-3'-phosphate
  modified_base 14: mod_base = OTHER; note = 2'-deoxy-2'-fluorouridine-3'-phosphate
  modified_base 15: mod_base = OTHER; note = 2'-O-methylcytidine-3'-phosphate
  modified_base 16: mod_base = OTHER; note = 2'-deoxy-2'-fluoroadenosine-3'-phosphate
  modified_base 17: mod_base = OTHER; note = 2'-O-methylguanosine-3'-phosphate
  modified_base 18: mod_base = OTHER; note = 2'-O-methyladenosine-3'-phosphate
  modified_base 19: mod_base = OTHER; note = 2'-O-methylguanosine-3'-phosphate
  modified_base 20: mod_base = OTHER; note = 2'-O-methylguanosine-3'-phosphate
  modified_base 21: mod_base = OTHER; note = 2'-O-methylcytidine-3'-phosphorothioate
  modified_base 22: mod_base = OTHER; note = 2'-O-methyluridine-3'-phosphorothioate
  modified_base 23: mod_base = OTHER; note = 2'-O-methylguanosine
aaaccaactcagctcagaggctg

SEQ ID NO: 1068 - RNA, 23 nt, synthetic construct
  source 1..23: mol_type = other RNA
  modified_base 1: mod_base = OTHER; note = 2'-O-methyladenosine-3'-phosphorothioate
  modified_base 2: mod_base = OTHER; note = 2'-deoxy-2'-fluoroadenosine-3'-phosphorothioate
  modified_base 3: mod_base = OTHER; note = 2'-O-methyladenosine-3'-phosphate
  modified_base 4: mod_base = OTHER; note = 2'-O-methyladenosine-3'-phosphate
  modified_base 5: mod_base = OTHER; note = 2'-O-methylcytidine-3'-phosphate
  modified_base 6: mod_base = OTHER; note = 2'-deoxy-2'-fluorocytidine-3'-phosphate
  modified_base 7: mod_base = OTHER; note = 2'-O-methyladenosine-3'-phosphate
  modified_base 8: mod_base = OTHER; note = 2'-O-methyladenosine-3'-phosphate
  modified_base 9: mod_base = OTHER; note = 2'-O-methylcytidine-3'-phosphate
  modified_base 10: mod_base = OTHER; note = 2'-O-methyluridine-3'-phosphate
  modified_base 11: mod_base = OTHER; note = 2'-O-methylcytidine-3'-phosphate
  modified_base 12: mod_base = OTHER; note = 2'-O-methyladenosine-3'-phosphate
  modified_base 13: mod_base = OTHER; note = 2'-O-methylguanosine-3'-phosphate
  modified_base 14: mod_base = OTHER; note = 2'-deoxy-2'-fluorocytidine-3'-phosphate
  modified_base 15: mod_base = OTHER; note = 2'-O-methyluridine-3'-phosphate
  modified_base 16: mod_base = OTHER; note = 2'-deoxy-2'-fluorocytidine-3'-phosphate
  modified_base 17: mod_base = OTHER; note = 2'-O-methyladenosine-3'-phosphate
  modified_base 18: mod_base = OTHER; note = 2'-O-methylguanosine-3'-phosphate
  modified_base 19: mod_base = OTHER; note = 2'-O-methyladenosine-3'-phosphate
  modified_base 20: mod_base = OTHER; note = 2'-O-methylguanosine-3'-phosphate
  modified_base 21: mod_base = OTHER; note = 2'-O-methylguanosine-3'-phosphorothioate
  modified_base 22: mod_base = OTHER; note = 2'-O-methylcytidine-3'-phosphorothioate
  modified_base 23: mod_base = OTHER; note = 2'-O-methyluridine
aaaaccaactcagctcagaggct

SEQ ID NO: 1069 - RNA, 23 nt, synthetic construct
  source 1..23: mol_type = other RNA
  modified_base 1: mod_base = OTHER; note = 2'-O-methyladenosine-3'-phosphorothioate
  modified_base 2: mod_base = OTHER; note = 2'-deoxy-2'-fluoroadenosine-3'-phosphorothioate
  modified_base 3: mod_base = OTHER; note = 2'-O-methyladenosine-3'-phosphate
  modified_base 4: mod_base = OTHER; note = 2'-O-methyladenosine-3'-phosphate
  modified_base 5: mod_base = OTHER; note = 2'-O-methyladenosine-3'-phosphate
  modified_base 6: mod_base = OTHER; note = 2'-deoxy-2'-fluorocytidine-3'-phosphate
  modified_base 7: mod_base = OTHER; note = 2'-O-methylcytidine-3'-phosphate
  modified_base 8: mod_base = OTHER; note = 2'-O-methyladenosine-3'-phosphate
  modified_base 9: mod_base = OTHER; note = 2'-O-methyladenosine-3'-phosphate
  modified_base 10: mod_base = OTHER; note = 2'-O-methylcytidine-3'-phosphate
  modified_base 11: mod_base = OTHER; note = 2'-O-methyluridine-3'-phosphate
  modified_base 12: mod_base = OTHER; note = 2'-O-methylcytidine-3'-phosphate
  modified_base 13: mod_base = OTHER; note = 2'-O-methyladenosine-3'-phosphate
  modified_base 14: mod_base = OTHER; note = 2'-deoxy-2'-fluoroguanosine-3'-phosphate
  modified_base 15: mod_base = OTHER; note = 2'-O-methylcytidine-3'-phosphate
  modified_base 16: mod_base = OTHER; note = 2'-deoxy-2'-fluorouridine-3'-phosphate
  modified_base 17: mod_base = OTHER; note = 2'-O-methylcytidine-3'-phosphate
  modified_base 18: mod_base = OTHER; note = 2'-O-methyladenosine-3'-phosphate
  modified_base 19: mod_base = OTHER; note = 2'-O-methylguanosine-3'-phosphate
  modified_base 20: mod_base = OTHER; note = 2'-O-methyladenosine-3'-phosphate
  modified_base 21: mod_base = OTHER; note = 2'-O-methylguanosine-3'-phosphorothioate
  modified_base 22: mod_base = OTHER; note = 2'-O-methylguanosine-3'-phosphorothioate
  modified_base 23: mod_base = OTHER; note = 2'-O-methylcytidine
aaaaaccaactcagctcagaggc

SEQ ID NO: 1070 - RNA, 23 nt, synthetic construct
  source 1..23: mol_type = other RNA
  modified_base 1: mod_base = OTHER; note = 2'-O-methyladenosine-3'-phosphorothioate
  modified_base 2: mod_base = OTHER; note = 2'-deoxy-2'-fluorouridine-3'-phosphorothioate
  modified_base 3: mod_base = OTHER; note = 2'-O-methyladenosine-3'-phosphate
  modified_base 4: mod_base = OTHER; note = 2'-O-methyladenosine-3'-phosphate
  modified_base 5: mod_base = OTHER; note = 2'-O-methyladenosine-3'-phosphate
  modified_base 6: mod_base = OTHER; note = 2'-deoxy-2'-fluoroadenosine-3'-phosphate
  modified_base 7: mod_base = OTHER; note = 2'-O-methylcytidine-3'-phosphate
  modified_base 8: mod_base = OTHER; note = 2'-O-methylcytidine-3'-phosphate
  modified_base 9: mod_base = OTHER; note = 2'-O-methyladenosine-3'-phosphate
  modified_base 10: mod_base = OTHER; note = 2'-O-methyladenosine-3'-phosphate
  modified_base 11: mod_base = OTHER; note = 2'-O-methylcytidine-3'-phosphate
  modified_base 12: mod_base = OTHER; note = 2'-O-methyluridine-3'-phosphate
  modified_base 13: mod_base = OTHER; note = 2'-O-methylcytidine-3'-phosphate
  modified_base 14: mod_base = OTHER; note = 2'-deoxy-2'-fluoroadenosine-3'-phosphate
  modified_base 15: mod_base = OTHER; note = 2'-O-methylguanosine-3'-phosphate
  modified_base 16: mod_base = OTHER; note = 2'-deoxy-2'-fluorocytidine-3'-phosphate
  modified_base 17: mod_base = OTHER; note = 2'-O-methyluridine-3'-phosphate
  modified_base 18: mod_base = OTHER; note = 2'-O-methylcytidine-3'-phosphate
  modified_base 19: mod_base = OTHER; note = 2'-O-methyladenosine-3'-phosphate
  modified_base 20: mod_base = OTHER; note = 2'-O-methylguanosine-3'-phosphate
  modified_base 21: mod_base = OTHER; note = 2'-O-methyladenosine-3'-phosphorothioate
  modified_base 22: mod_base = OTHER; note = 2'-O-methylguanosine-3'-phosphorothioate
  modified_base 23: mod_base = OTHER; note = 2'-O-methylguanosine
ataaaaccaactcagctcagagg

SEQ ID NO: 1071 - RNA, 23 nt, synthetic construct
  source 1..23: mol_type = other RNA
  modified_base 1: mod_base = OTHER; note = 2'-O-methyladenosine-3'-phosphorothioate
  modified_base 2: mod_base = OTHER; note = 2'-deoxy-2'-fluoroadenosine-3'-phosphorothioate
  modified_base 3: mod_base = OTHER; note = 2'-O-methyluridine-3'-phosphate
  modified_base 4: mod_base = OTHER; note = 2'-O-methyladenosine-3'-phosphate
  modified_base 5: mod_base = OTHER; note = 2'-O-methyladenosine-3'-phosphate
  modified_base 6: mod_base = OTHER; note = 2'-deoxy-2'-fluoroadenosine-3'-phosphate
  modified_base 7: mod_base = OTHER; note = 2'-O-methyladenosine-3'-phosphate
  modified_base 8: mod_base = OTHER; note = 2'-O-methylcytidine-3'-phosphate
  modified_base 9: mod_base = OTHER; note = 2'-O-methylcytidine-3'-phosphate
  modified_base 10: mod_base = OTHER; note = 2'-O-methyladenosine-3'-phosphate
  modified_base 11: mod_base = OTHER; note = 2'-O-methyladenosine-3'-phosphate
  modified_base 12: mod_base = OTHER; note = 2'-O-methylcytidine-3'-phosphate
  modified_base 13: mod_base = OTHER; note = 2'-O-methyluridine-3'-phosphate
  modified_base 14: mod_base = OTHER; note = 2'-deoxy-2'-fluorocytidine-3'-phosphate
  modified_base 15: mod_base = OTHER; note = 2'-O-methyladenosine-3'-phosphate
  modified_base 16: mod_base = OTHER; note = 2'-deoxy-2'-fluoroguanosine-3'-phosphate
  modified_base 17: mod_base = OTHER; note = 2'-O-methylcytidine-3'-phosphate
  modified_base 18: mod_base = OTHER; note = 2'-O-methyluridine-3'-phosphate
  modified_base 19: mod_base = OTHER; note = 2'-O-methylcytidine-3'-phosphate
  modified_base 20: mod_base = OTHER; note = 2'-O-methyladenosine-3'-phosphate
  modified_base 21: mod_base = OTHER; note = 2'-O-methylguanosine-3'-phosphorothioate
  modified_base 22: mod_base = OTHER; note = 2'-O-methyladenosine-3'-phosphorothioate
  modified_base 23: mod_base = OTHER; note = 2'-O-methylguanosine
aataaaaccaactcagctcagag

SEQ ID NO: 1072 - RNA, 23 nt, synthetic construct
  source 1..23: mol_type = other RNA
  modified_base 1: mod_base = OTHER; note = 2'-O-methyladenosine-3'-phosphorothioate
  modified_base 2: mod_base = OTHER; note = 2'-deoxy-2'-fluorocytidine-3'-phosphorothioate
  modified_base 3: mod_base = OTHER; note = 2'-O-methyladenosine-3'-phosphate
  modified_base 4: mod_base = OTHER; note = 2'-O-methyluridine-3'-phosphate
  modified_base 5: mod_base = OTHER; note = 2'-O-methyladenosine-3'-phosphate
  modified_base 6: mod_base = OTHER; note = 2'-deoxy-2'-fluoroadenosine-3'-phosphate
  modified_base 7: mod_base = OTHER; note = 2'-O-methyladenosine-3'-phosphate
  modified_base 8: mod_base = OTHER; note = 2'-O-methyladenosine-3'-phosphate
  modified_base 9: mod_base = OTHER; note = 2'-O-methylcytidine-3'-phosphate
  modified_base 10: mod_base = OTHER; note = 2'-O-methylcytidine-3'-phosphate
  modified_base 11: mod_base = OTHER; note = 2'-O-methyladenosine-3'-phosphate
  modified_base 12: mod_base = OTHER; note = 2'-O-methyladenosine-3'-phosphate
  modified_base 13: mod_base = OTHER; note = 2'-O-methylcytidine-3'-phosphate
  modified_base 14: mod_base = OTHER; note = 2'-deoxy-2'-fluorouridine-3'-phosphate
  modified_base 15: mod_base = OTHER; note = 2'-O-methylcytidine-3'-phosphate
  modified_base 16: mod_base = OTHER; note = 2'-deoxy-2'-fluoroadenosine-3'-phosphate
  modified_base 17: mod_base = OTHER; note = 2'-O-methylguanosine-3'-phosphate
  modified_base 18: mod_base = OTHER; note = 2'-O-methylcytidine-3'-phosphate
  modified_base 19: mod_base = OTHER; note = 2'-O-methyluridine-3'-phosphate
  modified_base 20: mod_base = OTHER; note = 2'-O-methylcytidine-3'-phosphate
  modified_base 21: mod_base = OTHER; note = 2'-O-methyladenosine-3'-phosphorothioate
  modified_base 22: mod_base = OTHER; note = 2'-O-methylguanosine-3'-phosphorothioate
  modified_base 23: mod_base = OTHER; note = 2'-O-methyladenosine
acataaaaccaactcagctcaga

SEQ ID NO: 1073 - RNA, 23 nt, synthetic construct
  source 1..23: mol_type = other RNA
  modified_base 1: mod_base = OTHER; note = 2'-O-methyladenosine-3'-phosphorothioate
  modified_base 2: mod_base = OTHER; note = 2'-deoxy-2'-fluorouridine-3'-phosphorothioate
  modified_base 3: mod_base = OTHER; note = 2'-O-methylcytidine-3'-phosphate
  modified_base 4: mod_base = OTHER; note = 2'-O-methyladenosine-3'-phosphate
  modified_base 5: mod_base = OTHER; note = 2'-O-methyluridine-3'-phosphate
  modified_base 6: mod_base = OTHER; note = 2'-deoxy-2'-fluoroadenosine-3'-phosphate
  modified_base 7: mod_base = OTHER; note = 2'-O-methyladenosine-3'-phosphate
  modified_base 8: mod_base = OTHER; note = 2'-O-methyladenosine-3'-phosphate
  modified_base 9: mod_base = OTHER; note = 2'-O-methyladenosine-3'-phosphate
  modified_base 10: mod_base = OTHER; note = 2'-O-methylcytidine-3'-phosphate
  modified_base 11: mod_base = OTHER; note = 2'-O-methylcytidine-3'-phosphate
  modified_base 12: mod_base = OTHER; note = 2'-O-methyladenosine-3'-phosphate
  modified_base 13: mod_base = OTHER; note = 2'-O-methyladenosine-3'-phosphate
  modified_base 14: mod_base = OTHER; note = 2'-deoxy-2'-fluorocytidine-3'-phosphate
  modified_base 15: mod_base = OTHER; note = 2'-O-methyluridine-3'-phosphate
  modified_base 16: mod_base = OTHER; note = 2'-deoxy-2'-fluorocytidine-3'-phosphate
  modified_base 17: mod_base = OTHER; note = 2'-O-methyladenosine-3'-phosphate
  modified_base 18: mod_base = OTHER; note = 2'-O-methylguanosine-3'-phosphate
  modified_base 19: mod_base = OTHER; note = 2'-O-methylcytidine-3'-phosphate
  modified_base 20: mod_base = OTHER; note = 2'-O-methyluridine-3'-phosphate
  modified_base 21: mod_base = OTHER; note = 2'-O-methylcytidine-3'-phosphorothioate
  modified_base 22: mod_base = OTHER; note = 2'-O-methyladenosine-3'-phosphorothioate
  modified_base 23: mod_base = OTHER; note = 2'-O-methylguanosine
atcataaaaccaactcagctcag

SEQ ID NO: 1074 - RNA, 23 nt, synthetic construct
  source 1..23: mol_type = other RNA
  modified_base 1: mod_base = OTHER; note = 2'-O-methyladenosine-3'-phosphorothioate
  modified_base 2: mod_base = OTHER; note = 2'-deoxy-2'-fluorouridine-3'-phosphorothioate
  modified_base 3: mod_base = OTHER; note = 2'-O-methyluridine-3'-phosphate
  modified_base 4: mod_base = OTHER; note = 2'-O-methylcytidine-3'-phosphate
  modified_base 5: mod_base = OTHER; note = 2'-O-methyladenosine-3'-phosphate
  modified_base 6: mod_base = OTHER; note = 2'-deoxy-2'-fluorouridine-3'-phosphate
  modified_base 7: mod_base = OTHER; note = 2'-O-methyladenosine-3'-phosphate
  modified_base 8: mod_base = OTHER; note = 2'-O-methyladenosine-3'-phosphate
  modified_base 9: mod_base = OTHER; note = 2'-O-methyladenosine-3'-phosphate
  modified_base 10: mod_base = OTHER; note = 2'-O-methyladenosine-3'-phosphate
  modified_base 11: mod_base = OTHER; note = 2'-O-methylcytidine-3'-phosphate
  modified_base 12: mod_base = OTHER; note = 2'-O-methylcytidine-3'-phosphate
  modified_base 13: mod_base = OTHER; note = 2'-O-methyladenosine-3'-phosphate
  modified_base 14: mod_base = OTHER; note = 2'-deoxy-2'-fluoroadenosine-3'-phosphate
  modified_base 15: mod_base = OTHER; note = 2'-O-methylcytidine-3'-phosphate
  modified_base 16: mod_base = OTHER; note = 2'-deoxy-2'-fluorouridine-3'-phosphate
  modified_base 17: mod_base = OTHER; note = 2'-O-methylcytidine-3'-phosphate
  modified_base 18: mod_base = OTHER; note = 2'-O-methyladenosine-3'-phosphate
  modified_base 19: mod_base = OTHER; note = 2'-O-methylguanosine-3'-phosphate
  modified_base 20: mod_base = OTHER; note = 2'-O-methylcytidine-3'-phosphate
  modified_base 21: mod_base = OTHER; note = 2'-O-methyluridine-3'-phosphorothioate
  modified_base 22: mod_base = OTHER; note = 2'-O-methylcytidine-3'-phosphorothioate
  modified_base 23: mod_base = OTHER; note = 2'-O-methyladenosine
attcataaaaccaactcagctca

SEQ ID NO: 1075 - DNA, 23 bp, synthetic construct
  source 1..23: mol_type = other DNA
  modified_base 1: mod_base = OTHER; note = 2'-O-methyladenosine-3'-phosphorothioate
  modified_base 2: mod_base = OTHER; note = 2'-deoxy-2'-fluorouridine-3'-phosphorothioate
  modified_base 3: mod_base = OTHER; note = 2'-O-methyluridine-3'-phosphate
  modified_base 4: mod_base = OTHER; note = 2'-O-methyluridine-3'-phosphate
  modified_base 6: mod_base = OTHER; note = 2'-O-methyladenosine-3'-phosphate
  modified_base 7: mod_base = OTHER; note = Thymidine-glycol nucleic acid (GNA), S-Isomer
  modified_base 8: mod_base = OTHER; note = 2'-O-methyladenosine-3'-phosphate
  modified_base 9: mod_base = OTHER; note = 2'-O-methyladenosine-3'-phosphate
  modified_base 10: mod_base = OTHER; note = 2'-O-methyladenosine-3'-phosphate
  modified_base 11: mod_base = OTHER; note = 2'-O-methyladenosine-3'-phosphate
  modified_base 12: mod_base = OTHER; note = 2'-O-methylcytidine-3'-phosphate
  modified_base 13: mod_base = OTHER; note = 2'-O-methylcytidine-3'-phosphate
  modified_base 14: mod_base = OTHER; note = 2'-deoxy-2'-fluoroadenosine-3'-phosphate
  modified_base 15: mod_base = OTHER; note = 2'-O-methyladenosine-3'-phosphate
  modified_base 16: mod_base = OTHER; note = 2'-deoxy-2'-fluorocytidine-3'-phosphate
  modified_base 17: mod_base = OTHER; note = 2'-O-methyluridine-3'-phosphate
  modified_base 18: mod_base = OTHER; note = 2'-O-methylcytidine-3'-phosphate
  modified_base 19: mod_base = OTHER; note = 2'-O-methyladenosine-3'-phosphate
  modified_base 20: mod_base = OTHER; note = 2'-O-methylguanosine-3'-phosphate
  modified_base 21: mod_base = OTHER; note = 2'-O-methylcytidine-3'-phosphorothioate
  modified_base 22: mod_base = OTHER; note = 2'-O-methyluridine-3'-phosphorothioate
  modified_base 23: mod_base = OTHER; note = 2'-O-methylcytidine
  misc_feature 1..4: note = RNA
  misc_feature 6..23: note = RNA
  misc_feature 5: note = DNA
atttcataaaaccaactcagctc

SEQ ID NO: 1076 - DNA, 23 bp, synthetic construct
  source 1..23: mol_type = other DNA
  modified_base 1: mod_base = OTHER; note = 2'-O-methyladenosine-3'-phosphorothioate
  modified_base 2: mod_base = OTHER; note = 2'-deoxy-2'-fluorouridine-3'-phosphorothioate
  modified_base 3: mod_base = OTHER; note = 2'-O-methyluridine-3'-phosphate
  modified_base 4: mod_base = OTHER; note = 2'-O-methyluridine-3'-phosphate
  modified_base 6: mod_base = OTHER; note = 2'-O-methylcytidine-3'-phosphate
  modified_base 7: mod_base = OTHER; note = Adenosine-glycol nucleic acid (GNA), S-isomer
  modified_base 8: mod_base = OTHER; note = 2'-O-methyluridine-3'-phosphate
  modified_base 9: mod_base = OTHER; note = 2'-O-methyladenosine-3'-phosphate
  modified_base 10: mod_base = OTHER; note = 2'-O-methyladenosine-3'-phosphate
  modified_base 11: mod_base = OTHER; note = 2'-O-methyladenosine-3'-phosphate
  modified_base 12: mod_base = OTHER; note = 2'-O-methyladenosine-3'-phosphate
  modified_base 13: mod_base = OTHER; note = 2'-O-methylcytidine-3'-phosphate
  modified_base 14: mod_base = OTHER; note = 2'-deoxy-2'-fluorocytidine-3'-phosphate
  modified_base 15: mod_base = OTHER; note = 2'-O-methyladenosine-3'-phosphate
  modified_base 16: mod_base = OTHER; note = 2'-deoxy-2'-fluoroadenosine-3'-phosphate
  modified_base 17: mod_base = OTHER; note = 2'-O-methylcytidine-3'-phosphate
  modified_base 18: mod_base = OTHER; note = 2'-O-methyluridine-3'-phosphate
  modified_base 19: mod_base = OTHER; note = 2'-O-methylcytidine-3'-phosphate
  modified_base 20: mod_base = OTHER; note = 2'-O-methyladenosine-3'-phosphate
  modified_base 21: mod_base = OTHER; note = 2'-O-methylguanosine-3'-phosphorothioate
  modified_base 22: mod_base = OTHER; note = 2'-O-methylcytidine-3'-phosphorothioate
  modified_base 23: mod_base = OTHER; note = 2'-O-methyluridine
  misc_feature 1..4: note = RNA
  misc_feature 6..23: note = RNA
  misc_feature 5: note = DNA
attttcataaaaccaactcagct

SEQ ID NO: 1077 - RNA, 23 nt, synthetic construct
  source 1..23: mol_type = other RNA
  modified_base 1: mod_base = OTHER; note = 2'-O-methyladenosine-3'-phosphorothioate
  modified_base 2: mod_base = OTHER; note = 2'-deoxy-2'-fluoroguanosine-3'-phosphorothioate
  modified_base 3: mod_base = OTHER; note = 2'-O-methylcytidine-3'-phosphate
  modified_base 4: mod_base = OTHER; note = 2'-O-methyluridine-3'-phosphate
  modified_base 5: mod_base = OTHER; note = 2'-O-methyluridine-3'-phosphate
  modified_base 6: mod_base = OTHER; note = 2'-deoxy-2'-fluorouridine-3'-phosphate
  modified_base 7: mod_base = OTHER; note = 2'-O-methyluridine-3'-phosphate
  modified_base 8: mod_base = OTHER; note = 2'-O-methylcytidine-3'-phosphate
  modified_base 9: mod_base = OTHER; note = 2'-O-methyladenosine-3'-phosphate
  modified_base 10: mod_base = OTHER; note = 2'-O-methyluridine-3'-phosphate
  modified_base 11: mod_base = OTHER; note = 2'-O-methyladenosine-3'-phosphate
  modified_base 12: mod_base = OTHER; note = 2'-O-methyladenosine-3'-phosphate
  modified_base 13: mod_base = OTHER; note = 2'-O-methyladenosine-3'-phosphate
  modified_base 14: mod_base = OTHER; note = 2'-deoxy-2'-fluoroadenosine-3'-phosphate
  modified_base 15: mod_base = OTHER; note = 2'-O-methylcytidine-3'-phosphate
  modified_base 16: mod_base = OTHER; note = 2'-deoxy-2'-fluorocytidine-3'-phosphate
  modified_base 17: mod_base = OTHER; note = 2'-O-methyladenosine-3'-phosphate
  modified_base 18: mod_base = OTHER; note = 2'-O-methyladenosine-3'-phosphate
  modified_base 19: mod_base = OTHER; note = 2'-O-methylcytidine-3'-phosphate
  modified_base 20: mod_base = OTHER; note = 2'-O-methyluridine-3'-phosphate
  modified_base 21: mod_base = OTHER; note = 2'-O-methylcytidine-3'-phosphorothioate
  modified_base 22: mod_base = OTHER; note = 2'-O-methyladenosine-3'-phosphorothioate
  modified_base 23: mod_base = OTHER; note = 2'-O-methylguanosine
agcttttcataaaaccaactcag

SEQ ID NO: 1078 - RNA, 23 nt, synthetic construct
  source 1..23: mol_type = other RNA
  modified_base 1: mod_base = OTHER; note = 2'-O-methyladenosine-3'-phosphorothioate
  modified_base 2: mod_base = OTHER; note = 2'-deoxy-2'-fluoroadenosine-3'-phosphorothioate
  modified_base 3: mod_base = OTHER; note = 2'-O-methylguanosine-3'-phosphate
  modified_base 4: mod_base = OTHER; note = 2'-O-methylcytidine-3'-phosphate
  modified_base 5: mod_base = OTHER; note = 2'-O-methyluridine-3'-phosphate
  modified_base 6: mod_base = OTHER; note = 2'-deoxy-2'-fluorouridine-3'-phosphate
  modified_base 7: mod_base = OTHER; note = 2'-O-methyluridine-3'-phosphate
  modified_base 8: mod_base = OTHER; note = 2'-O-methyluridine-3'-phosphate
  modified_base 9: mod_base = OTHER; note = 2'-O-methylcytidine-3'-phosphate
  modified_base 10: mod_base = OTHER; note = 2'-O-methyladenosine-3'-phosphate
  modified_base 11: mod_base = OTHER; note = 2'-O-methyluridine-3'-phosphate
  modified_base 12: mod_base = OTHER; note = 2'-O-methyladenosine-3'-phosphate
  modified_base 13: mod_base = OTHER; note = 2'-O-methyladenosine-3'-phosphate
  modified_base 14: mod_base = OTHER; note = 2'-deoxy-2'-fluoroadenosine-3'-phosphate
  modified_base 15: mod_base = OTHER; note = 2'-O-methyladenosine-3'-phosphate
  modified_base 16: mod_base = OTHER; note = 2'-deoxy-2'-fluorocytidine-3'-phosphate
  modified_base 17: mod_base = OTHER; note = 2'-O-methylcytidine-3'-phosphate
  modified_base 18: mod_base = OTHER; note = 2'-O-methyladenosine-3'-phosphate
  modified_base 19: mod_base = OTHER; note = 2'-O-methyladenosine-3'-phosphate
  modified_base 20: mod_base = OTHER; note = 2'-O-methylcytidine-3'-phosphate
  modified_base 21: mod_base = OTHER; note = 2'-O-methyluridine-3'-phosphorothioate
  modified_base 22: mod_base = OTHER; note = 2'-O-methylcytidine-3'-phosphorothioate
  modified_base 23: mod_base = OTHER; note = 2'-O-methyladenosine
aagcttttcataaaaccaactca

SEQ ID NO: 1079 - DNA, 23 bp, synthetic construct
  source 1..23: mol_type = other DNA
  modified_base 1: mod_base = OTHER; note = 2'-O-methyladenosine-3'-phosphorothioate
  modified_base 2: mod_base = OTHER; note = 2'-deoxy-2'-fluorouridine-3'-phosphorothioate
  modified_base 3: mod_base = OTHER; note = 2'-O-methyladenosine-3'-phosphate
  modified_base 4: mod_base = OTHER; note = 2'-O-methylguanosine-3'-phosphate
  modified_base 6: mod_base = OTHER; note = 2'-O-methyluridine-3'-phosphate
  modified_base 7: mod_base = OTHER; note = Thymidine-glycol nucleic acid (GNA), S-Isomer
  modified_base 8: mod_base = OTHER; note = 2'-O-methyluridine-3'-phosphate
  modified_base 9: mod_base = OTHER; note = 2'-O-methyluridine-3'-phosphate
  modified_base 10: mod_base = OTHER; note = 2'-O-methylcytidine-3'-phosphate
  modified_base 11: mod_base = OTHER; note = 2'-O-methyladenosine-3'-phosphate
  modified_base 12: mod_base = OTHER; note = 2'-O-methyluridine-3'-phosphate
  modified_base 13: mod_base = OTHER; note = 2'-O-methyladenosine-3'-phosphate
  modified_base 14: mod_base = OTHER; note = 2'-deoxy-2'-fluoroadenosine-3'-phosphate
  modified_base 15: mod_base = OTHER; note = 2'-O-methyladenosine-3'-phosphate
  modified_base 16: mod_base = OTHER; note = 2'-deoxy-2'-fluoroadenosine-3'-phosphate
  modified_base 17: mod_base = OTHER; note = 2'-O-methylcytidine-3'-phosphate
  modified_base 18: mod_base = OTHER; note = 2'-O-methylcytidine-3'-phosphate
  modified_base 19: mod_base = OTHER; note = 2'-O-methyladenosine-3'-phosphate
  modified_base 20: mod_base = OTHER; note = 2'-O-methyladenosine-3'-phosphate
  modified_base 21: mod_base = OTHER; note = 2'-O-methylcytidine-3'-phosphorothioate
  modified_base 22: mod_base = OTHER; note = 2'-O-methyluridine-3'-phosphorothioate
  modified_base 23: mod_base = OTHER; note = 2'-O-methylcytidine
  misc_feature 1..4: note = RNA
  misc_feature 6..23: note = RNA
  misc_feature 5: note = DNA
atagcttttcataaaaccaactc

SEQ ID NO: 1080 - RNA, 23 nt, synthetic construct
  source 1..23: mol_type = other RNA
  modified_base 1: mod_base = OTHER; note = 2'-O-methyladenosine-3'-phosphorothioate
  modified_base 2: mod_base = OTHER; note = 2'-deoxy-2'-fluorocytidine-3'-phosphorothioate
  modified_base 3: mod_base = OTHER; note = 2'-O-methyluridine-3'-phosphate
  modified_base 4: mod_base = OTHER; note = 2'-O-methyladenosine-3'-phosphate
  modified_base 5: mod_base = OTHER; note = 2'-O-methylguanosine-3'-phosphate
  modified_base 6: mod_base = OTHER; note = 2'-deoxy-2'-fluorocytidine-3'-phosphate
  modified_base 7: mod_base = OTHER; note = 2'-O-methyluridine-3'-phosphate
  modified_base 8: mod_base = OTHER; note = 2'-O-methyluridine-3'-phosphate
  modified_base 9: mod_base = OTHER; note = 2'-O-methyluridine-3'-phosphate
  modified_base 10: mod_base = OTHER; note = 2'-O-methyluridine-3'-phosphate
  modified_base 11: mod_base = OTHER; note = 2'-O-methylcytidine-3'-phosphate
  modified_base 12: mod_base = OTHER; note = 2'-O-methyladenosine-3'-phosphate
  modified_base 13: mod_base = OTHER; note = 2'-O-methyluridine-3'-phosphate
  modified_base 14: mod_base = OTHER; note = 2'-deoxy-2'-fluoroadenosine-3'-phosphate
  modified_base 15: mod_base = OTHER; note = 2'-O-methyladenosine-3'-phosphate
  modified_base 16: mod_base = OTHER; note = 2'-deoxy-2'-fluoroadenosine-3'-phosphate
  modified_base 17: mod_base = OTHER; note = 2'-O-methyladenosine-3'-phosphate
  modified_base 18: mod_base = OTHER; note = 2'-O-methylcytidine-3'-phosphate
  modified_base 19: mod_base = OTHER; note = 2'-O-methylcytidine-3'-phosphate
  modified_base 20: mod_base = OTHER; note = 2'-O-methyladenosine-3'-phosphate
  modified_base 21: mod_base = OTHER; note = 2'-O-methyladenosine-3'-phosphorothioate
  modified_base 22: mod_base = OTHER; note = 2'-O-methylcytidine-3'-phosphorothioate
  modified_base 23: mod_base = OTHER; note = 2'-O-methyluridine
actagcttttcataaaaccaact

SEQ ID NO: 1081 - DNA, 23 bp, synthetic construct
  source 1..23: mol_type = other DNA
  modified_base 1: mod_base = OTHER; note = 2'-O-methyladenosine-3'-phosphorothioate
  modified_base 2: mod_base = OTHER; note = 2'-deoxy-2'-fluorocytidine-3'-phosphorothioate
  modified_base 3: mod_base = OTHER; note = 2'-O-methyluridine-3'-phosphate
  modified_base 4: mod_base = OTHER; note = 2'-O-methyladenosine-3'-phosphate
  modified_base 6: mod_base = OTHER; note = 2'-O-methylcytidine-3'-phosphate
  modified_base 7: mod_base = OTHER; note = Thymidine-glycol nucleic acid (GNA), S-Isomer
  modified_base 8: mod_base = OTHER; note = 2'-O-methyluridine-3'-phosphate
  modified_base 9: mod_base = OTHER; note = 2'-O-methyluridine-3'-phosphate
  modified_base 10: mod_base = OTHER; note = 2'-O-methyluridine-3'-phosphate
  modified_base 11: mod_base = OTHER; note = 2'-O-methylcytidine-3'-phosphate
  modified_base 12: mod_base = OTHER; note = 2'-O-methyladenosine-3'-phosphate
  modified_base 13: mod_base = OTHER; note = 2'-O-methyluridine-3'-phosphate
  modified_base 14: mod_base = OTHER; note = 2'-deoxy-2'-fluoroadenosine-3'-phosphate
  modified_base 15: mod_base = OTHER; note = 2'-O-methyladenosine-3'-phosphate
  modified_base 16: mod_base = OTHER; note = 2'-deoxy-2'-fluoroadenosine-3'-phosphate
  modified_base 17: mod_base = OTHER; note = 2'-O-methyladenosine-3'-phosphate
  modified_base 18: mod_base = OTHER; note = 2'-O-methylcytidine-3'-phosphate
  modified_base 19: mod_base = OTHER; note = 2'-O-methylcytidine-3'-phosphate
  modified_base 20: mod_base = OTHER; note = 2'-O-methyladenosine-3'-phosphate
  modified_base 21: mod_base = OTHER; note = 2'-O-methyladenosine-3'-phosphorothioate
  modified_base 22: mod_base = OTHER; note = 2'-O-methylcytidine-3'-phosphorothioate
  modified_base 23: mod_base = OTHER; note = 2'-O-methyluridine
  misc_feature 1..4: note = RNA
  misc_feature 6..23: note = RNA
  misc_feature 5: note = DNA
actagcttttcataaaaccaact

SEQ ID NO: 1082 - RNA, 23 nt, synthetic construct
  source 1..23: mol_type = other RNA
  modified_base 1: mod_base = OTHER; note = 2'-O-methyladenosine-3'-phosphorothioate
  modified_base 2: mod_base = OTHER; note = 2'-deoxy-2'-fluorocytidine-3'-phosphorothioate
  modified_base 3: mod_base = OTHER; note = 2'-O-methylcytidine-3'-phosphate
  modified_base 4: mod_base = OTHER; note = 2'-O-methyluridine-3'-phosphate
  modified_base 5: mod_base = OTHER; note = 2'-O-methyladenosine-3'-phosphate
  modified_base 6: mod_base = OTHER; note = 2'-deoxy-2'-fluoroguanosine-3'-phosphate
  modified_base 7: mod_base = OTHER; note = 2'-O-methylcytidine-3'-phosphate
  modified_base 8: mod_base = OTHER; note = 2'-O-methyluridine-3'-phosphate
  modified_base 9: mod_base = OTHER; note = 2'-O-methyluridine-3'-phosphate
  modified_base 10: mod_base = OTHER; note = 2'-O-methyluridine-3'-phosphate
  modified_base 11: mod_base = OTHER; note = 2'-O-methyluridine-3'-phosphate
  modified_base 12: mod_base = OTHER; note = 2'-O-methylcytidine-3'-phosphate
  modified_base 13: mod_base = OTHER; note = 2'-O-methyladenosine-3'-phosphate
  modified_base 14: mod_base = OTHER; note = 2'-deoxy-2'-fluorouridine-3'-phosphate
  modified_base 15: mod_base = OTHER; note = 2'-O-methyladenosine-3'-phosphate
  modified_base 16: mod_base = OTHER; note = 2'-deoxy-2'-fluoroadenosine-3'-phosphate
  modified_base 17: mod_base = OTHER; note = 2'-O-methyladenosine-3'-phosphate
  modified_base 18: mod_base = OTHER; note = 2'-O-methyladenosine-3'-phosphate
  modified_base 19: mod_base = OTHER; note = 2'-O-methylcytidine-3'-phosphate
  modified_base 20: mod_base = OTHER; note = 2'-O-methylcytidine-3'-phosphate
  modified_base 21: mod_base = OTHER; note = 2'-O-methyladenosine-3'-phosphorothioate
  modified_base 22: mod_base = OTHER; note = 2'-O-methyladenosine-3'-phosphorothioate
  modified_base 23: mod_base = OTHER; note = 2'-O-methylcytidine
acctagcttttcataaaaccaac

SEQ ID NO: 1083 - RNA, 23 nt, synthetic construct
  source 1..23: mol_type = other RNA
  modified_base 1: mod_base = OTHER; note = 2'-O-methyladenosine-3'-phosphorothioate
  modified_base 2: mod_base = OTHER; note = 2'-deoxy-2'-fluorouridine-3'-phosphorothioate
  modified_base 3: mod_base = OTHER; note = 2'-O-methyluridine-3'-phosphate
  modified_base 4: mod_base = OTHER; note = 2'-O-methylcytidine-3'-phosphate
  modified_base 5: mod_base = OTHER; note = 2'-O-methylcytidine-3'-phosphate
  modified_base 6: mod_base = OTHER; note = 2'-deoxy-2'-fluorouridine-3'-phosphate
  modified_base 7: mod_base = OTHER; note = 2'-O-methyladenosine-3'-phosphate
  modified_base 8: mod_base = OTHER; note = 2'-O-methylguanosine-3'-phosphate
  modified_base 9: mod_base = OTHER; note = 2'-O-methylcytidine-3'-phosphate
  modified_base 10: mod_base = OTHER; note = 2'-O-methyluridine-3'-phosphate
  modified_base 11: mod_base = OTHER; note = 2'-O-methyluridine-3'-phosphate
  modified_base 12: mod_base = OTHER; note = 2'-O-methyluridine-3'-phosphate
  modified_base 13: mod_base = OTHER; note = 2'-O-methyluridine-3'-phosphate
  modified_base 14: mod_base = OTHER; note = 2'-deoxy-2'-fluorocytidine-3'-phosphate
  modified_base 15: mod_base = OTHER; note = 2'-O-methyladenosine-3'-phosphate
  modified_base 16: mod_base = OTHER; note = 2'-deoxy-2'-fluorouridine-3'-phosphate
  modified_base 17: mod_base = OTHER; note = 2'-O-methyladenosine-3'-phosphate
  modified_base 18: mod_base = OTHER; note = 2'-O-methyladenosine-3'-phosphate
  modified_base 19: mod_base = OTHER; note = 2'-O-methyladenosine-3'-phosphate
  modified_base 20: mod_base = OTHER; note = 2'-O-methyladenosine-3'-phosphate
  modified_base 21: mod_base = OTHER; note = 2'-O-methylcytidine-3'-phosphorothioate
  modified_base 22: mod_base = OTHER; note = 2'-O-methylcytidine-3'-phosphorothioate
  modified_base 23: mod_base = OTHER; note = 2'-O-methyladenosine
attcctagcttttcataaaacca

SEQ ID NO: 1084 - DNA, 23 bp, synthetic construct
  source 1..23: mol_type = other DNA
  modified_base 1: mod_base = OTHER; note = 2'-O-methyladenosine-3'-phosphorothioate
  modified_base 2: mod_base = OTHER; note = 2'-deoxy-2'-fluorouridine-3'-phosphorothioate
  modified_base 3: mod_base = OTHER; note = 2'-O-methyluridine-3'-phosphate
  modified_base 4: mod_base = OTHER; note = 2'-O-methylcytidine-3'-phosphate
  modified_base 6: mod_base = OTHER; note = 2'-O-methyluridine-3'-phosphate
  modified_base 7: mod_base = OTHER; note = Adenosine-glycol nucleic acid (GNA), S-isomer
  modified_base 8: mod_base = OTHER; note = 2'-O-methylguanosine-3'-phosphate
  modified_base 9: mod_base = OTHER; note = 2'-O-methylcytidine-3'-phosphate
  modified_base 10: mod_base = OTHER; note = 2'-O-methyluridine-3'-phosphate
  modified_base 11: mod_base = OTHER; note = 2'-O-methyluridine-3'-phosphate
  modified_base 12: mod_base = OTHER; note = 2'-O-methyluridine-3'-phosphate
  modified_base 13: mod_base = OTHER; note = 2'-O-methyluridine-3'-phosphate
  modified_base 14: mod_base = OTHER; note = 2'-deoxy-2'-fluorocytidine-3'-phosphate
  modified_base 15: mod_base = OTHER; note = 2'-O-methyladenosine-3'-phosphate
  modified_base 16: mod_base = OTHER; note = 2'-deoxy-2'-fluorouridine-3'-phosphate
  modified_base 17: mod_base = OTHER; note = 2'-O-methyladenosine-3'-phosphate
  modified_base 18: mod_base = OTHER; note = 2'-O-methyladenosine-3'-phosphate
  modified_base 19: mod_base = OTHER; note = 2'-O-methyladenosine-3'-phosphate
  modified_base 20: mod_base = OTHER; note = 2'-O-methyladenosine-3'-phosphate
  modified_base 21: mod_base = OTHER; note = 2'-O-methylcytidine-3'-phosphorothioate
  modified_base 22: mod_base = OTHER; note = 2'-O-methylcytidine-3'-phosphorothioate
  modified_base 23: mod_base = OTHER; note = 2'-O-methyladenosine
  misc_feature 1..4: note = RNA
  misc_feature 6..23: note = RNA
  misc_feature 5: note = DNA
attcctagcttttcataaaacca

SEQ ID NO: 1085 - RNA, 23 nt, synthetic construct
  source 1..23: mol_type = other RNA
  modified_base 1: mod_base = OTHER; note = 2'-O-methyladenosine-3'-phosphorothioate
  modified_base 2: mod_base = OTHER; note = 2'-deoxy-2'-fluorocytidine-3'-phosphorothioate
  modified_base 3: mod_base = OTHER; note = 2'-O-methyluridine-3'-phosphate
  modified_base 4: mod_base = OTHER; note = 2'-O-methyluridine-3'-phosphate
  modified_base 5: mod_base = OTHER; note = 2'-O-methylcytidine-3'-phosphate
  modified_base 6: mod_base = OTHER; note = 2'-deoxy-2'-fluorocytidine-3'-phosphate
  modified_base 7: mod_base = OTHER; note = 2'-O-methyluridine-3'-phosphate
  modified_base 8: mod_base = OTHER; note = 2'-O-methyladenosine-3'-phosphate
  modified_base 9: mod_base = OTHER; note = 2'-O-methylguanosine-3'-phosphate
  modified_base 10: mod_base = OTHER; note = 2'-O-methylcytidine-3'-phosphate
  modified_base 11: mod_base = OTHER; note = 2'-O-methyluridine-3'-phosphate
  modified_base 12: mod_base = OTHER; note = 2'-O-methyluridine-3'-phosphate
  modified_base 13: mod_base = OTHER; note = 2'-O-methyluridine-3'-phosphate
  modified_base 14: mod_base = OTHER; note = 2'-deoxy-2'-fluorouridine-3'-phosphate
  modified_base 15: mod_base = OTHER; note = 2'-O-methylcytidine-3'-phosphate
  modified_base 16: mod_base = OTHER; note = 2'-deoxy-2'-fluoroadenosine-3'-phosphate
  modified_base 17: mod_base = OTHER; note = 2'-O-methyluridine-3'-phosphate
  modified_base 18: mod_base = OTHER; note = 2'-O-methyladenosine-3'-phosphate
  modified_base 19: mod_base = OTHER; note = 2'-O-methyladenosine-3'-phosphate
  modified_base 20: mod_base = OTHER; note = 2'-O-methyladenosine-3'-phosphate
  modified_base 21: mod_base = OTHER; note = 2'-O-methyladenosine-3'-phosphorothioate
  modified_base 22: mod_base = OTHER; note = 2'-O-methylcytidine-3'-phosphorothioate
  modified_base 23: mod_base = OTHER; note = 2'-O-methylcytidine
acttcctagcttttcataaaacc

SEQ ID NO: 1086 - DNA, 23 bp, synthetic construct
  source 1..23: mol_type = other DNA
  modified_base 1: mod_base = OTHER; note = 2'-O-methyladenosine-3'-phosphorothioate
  modified_base 2: mod_base = OTHER; note = 2'-deoxy-2'-fluorocytidine-3'-phosphorothioate
  modified_base 3: mod_base = OTHER; note = 2'-O-methyluridine-3'-phosphate
  modified_base 4: mod_base = OTHER; note = 2'-O-methyluridine-3'-phosphate
  modified_base 6: mod_base = OTHER; note = 2'-O-methylcytidine-3'-phosphate
  modified_base 7: mod_base = OTHER; note = Thymidine-glycol nucleic acid (GNA), S-Isomer
  modified_base 8: mod_base = OTHER; note = 2'-O-methyladenosine-3'-phosphate
  modified_base 9: mod_base = OTHER; note = 2'-O-methylguanosine-3'-phosphate
  modified_base 10: mod_base = OTHER; note = 2'-O-methylcytidine-3'-phosphate
  modified_base 11: mod_base = OTHER; note = 2'-O-methyluridine-3'-phosphate
  modified_base 12: mod_base = OTHER; note = 2'-O-methyluridine-3'-phosphate
  modified_base 13: mod_base = OTHER; note = 2'-O-methyluridine-3'-phosphate
  modified_base 14: mod_base = OTHER; note = 2'-deoxy-2'-fluorouridine-3'-phosphate
  modified_base 15: mod_base = OTHER; note = 2'-O-methylcytidine-3'-phosphate
  modified_base 16: mod_base = OTHER; note = 2'-deoxy-2'-fluoroadenosine-3'-phosphate
  modified_base 17: mod_base = OTHER; note = 2'-O-methyluridine-3'-phosphate
  modified_base 18: mod_base = OTHER; note = 2'-O-methyladenosine-3'-phosphate
  modified_base 19: mod_base = OTHER; note = 2'-O-methyladenosine-3'-phosphate
  modified_base 20: mod_base = OTHER; note = 2'-O-methyladenosine-3'-phosphate
  modified_base 21: mod_base = OTHER; note = 2'-O-methyladenosine-3'-phosphorothioate
  modified_base 22: mod_base = OTHER; note = 2'-O-methylcytidine-3'-phosphorothioate
  modified_base 23: mod_base = OTHER; note = 2'-O-methylcytidine
  misc_feature 1..4: note = RNA
  misc_feature 6..23: note = RNA
  misc_feature 5: note = DNA
acttcctagcttttcataaaacc

SEQ ID NO: 1087 - DNA, 23 bp, synthetic construct
  source 1..23: mol_type = other DNA
  modified_base 1: mod_base = OTHER; note = 2'-O-methyladenosine-3'-phosphorothioate
  modified_base 2: mod_base = OTHER; note = 2'-deoxy-2'-fluorouridine-3'-phosphorothioate
  modified_base 3: mod_base = OTHER; note = 2'-O-methyluridine-3'-phosphate
  modified_base 4: mod_base = OTHER; note = 2'-O-methylguanosine-3'-phosphate
  modified_base 6: mod_base = OTHER; note = 2'-O-methyluridine-3'-phosphate
  modified_base 7: mod_base = OTHER; note = Thymidine-glycol nucleic acid (GNA), S-Isomer
  modified_base 8: mod_base = OTHER; note = 2'-O-methylcytidine-3'-phosphate
  modified_base 9: mod_base = OTHER; note = 2'-O-methylcytidine-3'-phosphate
  modified_base 10: mod_base = OTHER; note = 2'-O-methyluridine-3'-phosphate
  modified_base 11: mod_base = OTHER; note = 2'-O-methyladenosine-3'-phosphate
  modified_base 12: mod_base = OTHER; note = 2'-O-methylguanosine-3'-phosphate
  modified_base 13: mod_base = OTHER; note = 2'-O-methylcytidine-3'-phosphate
  modified_base 14: mod_base = OTHER; note = 2'-deoxy-2'-fluorouridine-3'-phosphate
  modified_base 15: mod_base = OTHER; note = 2'-O-methyluridine-3'-phosphate
  modified_base 16: mod_base = OTHER; note = 2'-deoxy-2'-fluorouridine-3'-phosphate
  modified_base 17: mod_base = OTHER; note = 2'-O-methyluridine-3'-phosphate
  modified_base 18: mod_base = OTHER; note = 2'-O-methylcytidine-3'-phosphate
  modified_base 19: mod_base = OTHER; note = 2'-O-methyladenosine-3'-phosphate
  modified_base 20: mod_base = OTHER; note = 2'-O-methyluridine-3'-phosphate
  modified_base 21: mod_base = OTHER; note = 2'-O-methyladenosine-3'-phosphorothioate
  modified_base 22: mod_base = OTHER; note = 2'-O-methyladenosine-3'-phosphorothioate
  modified_base 23: mod_base = OTHER; note = 2'-O-methyladenosine
  misc_feature 1..4: note = RNA
  misc_feature 6..23: note = RNA
  misc_feature 5: note = DNA
attgcttcctagcttttcataaa

SEQ ID NO: 1088 - RNA, 23 nt, synthetic construct
  source 1..23: mol_type = other RNA
  modified_base 1: mod_base = OTHER; note = 2'-O-methyladenosine-3'-phosphorothioate
  modified_base 2: mod_base = OTHER; note = 2'-deoxy-2'-fluorocytidine-3'-phosphorothioate
  modified_base 3: mod_base = OTHER; note = 2'-O-methyladenosine-3'-phosphate
  modified_base 4: mod_base = OTHER; note = 2'-O-methyluridine-3'-phosphate
  modified_base 5: mod_base = OTHER; note = 2'-O-methyluridine-3'-phosphate
  modified_base 6: mod_base = OTHER; note = 2'-deoxy-2'-fluorouridine-3'-phosphate
  modified_base 7: mod_base = OTHER; note = 2'-O-methylcytidine-3'-phosphate
  modified_base 8: mod_base = OTHER; note = 2'-O-methylcytidine-3'-phosphate
  modified_base 9: mod_base = OTHER; note = 2'-O-methylcytidine-3'-phosphate
  modified_base 10: mod_base = OTHER; note = 2'-O-methyladenosine-3'-phosphate
  modified_base 11: mod_base = OTHER; note = 2'-O-methyladenosine-3'-phosphate
  modified_base 12: mod_base = OTHER; note = 2'-O-methylcytidine-3'-phosphate
  modified_base 13: mod_base = OTHER; note = 2'-O-methylcytidine-3'-phosphate
  modified_base 14: mod_base = OTHER; note = 2'-deoxy-2'-fluoroadenosine-3'-phosphate
  modified_base 15: mod_base = OTHER; note = 2'-O-methylguanosine-3'-phosphate
  modified_base 16: mod_base = OTHER; note = 2'-deoxy-2'-fluorocytidine-3'-phosphate
  modified_base 17: mod_base = OTHER; note = 2'-O-methyluridine-3'-phosphate
  modified_base 18: mod_base = OTHER; note = 2'-O-methylguanosine-3'-phosphate
  modified_base 19: mod_base = OTHER; note = 2'-O-methyladenosine-3'-phosphate
  modified_base 20: mod_base = OTHER; note = 2'-O-methyladenosine-3'-phosphate
  modified_base 21: mod_base = OTHER; note = 2'-O-methyluridine-3'-phosphorothioate
  modified_base 22: mod_base = OTHER; note = 2'-O-methyluridine-3'-phosphorothioate
  modified_base 23: mod_base = OTHER; note = 2'-O-methyladenosine
acatttcccaaccagctgaatta

SEQ ID NO: 1089 - DNA, 23 bp, synthetic construct
  source 1..23: mol_type = other DNA
  modified_base 1: mod_base = OTHER; note = 2'-O-methyladenosine-3'-phosphorothioate
  modified_base 2: mod_base = OTHER; note = 2'-deoxy-2'-fluorouridine-3'-phosphorothioate
  modified_base 3: mod_base = OTHER; note = 2'-O-methylguanosine-3'-phosphate
  modified_base 4: mod_base = OTHER; note = 2'-O-methyluridine-3'-phosphate
  modified_base 6: mod_base = OTHER; note = 2'-O-methyladenosine-3'-phosphate
  modified_base 7: mod_base = OTHER; note = Thymidine-glycol nucleic acid (GNA), S-Isomer
  modified_base 8: mod_base = OTHER; note = 2'-O-methyluridine-3'-phosphate
  modified_base 9: mod_base = OTHER; note = 2'-O-methyluridine-3'-phosphate
  modified_base 10: mod_base = OTHER; note = 2'-O-methylcytidine-3'-phosphate
  modified_base 11: mod_base = OTHER; note = 2'-O-methylcytidine-3'-phosphate
  modified_base 12: mod_base = OTHER; note = 2'-O-methylcytidine-3'-phosphate
  modified_base 13: mod_base = OTHER; note = 2'-O-methyladenosine-3'-phosphate
  modified_base 14: mod_base = OTHER; note = 2'-deoxy-2'-fluoroadenosine-3'-phosphate
  modified_base 15: mod_base = OTHER; note = 2'-O-methylcytidine-3'-phosphate
  modified_base 16: mod_base = OTHER; note = 2'-deoxy-2'-fluorocytidine-3'-phosphate
  modified_base 17: mod_base = OTHER; note = 2'-O-methyladenosine-3'-phosphate
  modified_base 18: mod_base = OTHER; note = 2'-O-methylguanosine-3'-phosphate
  modified_base 19: mod_base = OTHER; note = 2'-O-methylcytidine-3'-phosphate
  modified_base 20: mod_base = OTHER; note = 2'-O-methyluridine-3'-phosphate
  modified_base 21: mod_base = OTHER; note = 2'-O-methylguanosine-3'-phosphorothioate
  modified_base 22: mod_base = OTHER; note = 2'-O-methyladenosine-3'-phosphorothioate
  modified_base 23: mod_base = OTHER; note = 2'-O-methyladenosine
  misc_feature 1..4: note = RNA
  misc_feature 6..23: note = RNA
  misc_feature 5: note = DNA
atgtcatttcccaaccagctgaa

SEQ ID NO: 1090 - DNA, 23 bp, synthetic construct
  source 1..23: mol_type = other DNA
  modified_base 1: mod_base = OTHER; note = 2'-O-methyladenosine-3'-phosphorothioate
  modified_base 2: mod_base = OTHER; note = 2'-deoxy-2'-fluoroguanosine-3'-phosphorothioate
  modified_base 3: mod_base = OTHER; note = 2'-O-methyluridine-3'-phosphate
  modified_base 4: mod_base = OTHER; note = 2'-O-methylguanosine-3'-phosphate
  modified_base 6: mod_base = OTHER; note = 2'-O-methylcytidine-3'-phosphate
  modified_base 7: mod_base = OTHER; note = Adenosine-glycol nucleic acid (GNA), S-isomer
  modified_base 8: mod_base = OTHER; note = 2'-O-methyluridine-3'-phosphate
  modified_base 9: mod_base = OTHER; note = 2'-O-methyluridine-3'-phosphate
  modified_base 10: mod_base = OTHER; note = 2'-O-methyluridine-3'-phosphate
  modified_base 11: mod_base = OTHER; note = 2'-O-methylcytidine-3'-phosphate
  modified_base 12: mod_base = OTHER; note = 2'-O-methylcytidine-3'-phosphate
  modified_base 13: mod_base = OTHER; note = 2'-O-methylcytidine-3'-phosphate
  modified_base 14: mod_base = OTHER; note = 2'-deoxy-2'-fluoroadenosine-3'-phosphate
  modified_base 15: mod_base = OTHER; note = 2'-O-methyladenosine-3'-phosphate
  modified_base 16: mod_base = OTHER; note = 2'-deoxy-2'-fluorocytidine-3'-phosphate
  modified_base 17: mod_base = OTHER; note = 2'-O-methylcytidine-3'-phosphate
  modified_base 18: mod_base = OTHER; note = 2'-O-methyladenosine-3'-phosphate
  modified_base 19: mod_base = OTHER; note = 2'-O-methylguanosine-3'-phosphate
  modified_base 20: mod_base = OTHER; note = 2'-O-methylcytidine-3'-phosphate
  modified_base 21: mod_base = OTHER; note = 2'-O-methyluridine-3'-phosphorothioate
  modified_base 22: mod_base = OTHER; note = 2'-O-methylguanosine-3'-phosphorothioate
  modified_base 23: mod_base = OTHER; note = 2'-O-methyladenosine
  misc_feature 1..4: note = RNA
  misc_feature 6..23: note = RNA
  misc_feature 5: note = DNA
agtgtcatttcccaaccagctga

SEQ ID NO: 1091 - RNA, 23 nt, synthetic construct
  source 1..23: mol_type = other RNA
  modified_base 1: mod_base = OTHER; note = 2'-O-methyladenosine-3'-phosphorothioate
  modified_base 2: mod_base = OTHER; note = 2'-deoxy-2'-fluorocytidine-3'-phosphorothioate
  modified_base 3: mod_base = OTHER; note = 2'-O-methyladenosine-3'-phosphate
  modified_base 4: mod_base = OTHER; note = 2'-O-methylguanosine-3'-phosphate
  modified_base 5: mod_base = OTHER; note = 2'-O-methyluridine-3'-phosphate
  modified_base 6: mod_base = OTHER; note = 2'-deoxy-2'-fluoroadenosine-3'-phosphate
  modified_base 7: mod_base = OTHER; note = 2'-O-methyladenosine-3'-phosphate
  modified_base 8: mod_base = OTHER; note = 2'-O-methylguanosine-3'-phosphate
  modified_base 9: mod_base = OTHER; note = 2'-O-methylguanosine-3'-phosphate
  modified_base 10: mod_base = OTHER; note = 2'-O-methylguanosine-3'-phosphate
  modified_base 11: mod_base = OTHER; note = 2'-O-methyladenosine-3'-phosphate
  modified_base 12: mod_base = OTHER; note = 2'-O-methylcytidine-3'-phosphate
  modified_base 13: mod_base = OTHER; note = 2'-O-methylcytidine-3'-phosphate
  modified_base 14: mod_base = OTHER; note = 2'-deoxy-2'-fluorocytidine-3'-phosphate
  modified_base 15: mod_base = OTHER; note = 2'-O-methyluridine-3'-phosphate
  modified_base 16: mod_base = OTHER; note = 2'-deoxy-2'-fluorocytidine-3'-phosphate
  modified_base 17: mod_base = OTHER; note = 2'-O-methyluridine-3'-phosphate
  modified_base 18: mod_base = OTHER; note = 2'-O-methylguanosine-3'-phosphate
  modified_base 19: mod_base = OTHER; note = 2'-O-methylcytidine-3'-phosphate
  modified_base 20: mod_base = OTHER; note = 2'-O-methyladenosine-3'-phosphate
  modified_base 21: mod_base = OTHER; note = 2'-O-methylcytidine-3'-phosphorothioate
  modified_base 22: mod_base = OTHER; note = 2'-O-methyluridine-3'-phosphorothioate
  modified_base 23: mod_base = OTHER; note = 2'-O-methylguanosine
acagtaagggaccctctgcactg

SEQ ID NO: 1092 - RNA, 23 nt, synthetic construct
  source 1..23: mol_type = other RNA
  modified_base 1: mod_base = OTHER; note = 2'-O-methyladenosine-3'-phosphorothioate
  modified_base 2: mod_base = OTHER; note = 2'-deoxy-2'-fluorouridine-3'-phosphorothioate
  modified_base 3: mod_base = OTHER; note = 2'-O-methylcytidine-3'-phosphate
  modified_base 4: mod_base = OTHER; note = 2'-O-methyladenosine-3'-phosphate
  modified_base 5: mod_base = OTHER; note = 2'-O-methylguanosine-3'-phosphate
  modified_base 6: mod_base = OTHER; note = 2'-deoxy-2'-fluorouridine-3'-phosphate
  modified_base 7: mod_base = OTHER; note = 2'-O-methyladenosine-3'-phosphate
  modified_base 8: mod_base = OTHER; note = 2'-O-methyladenosine-3'-phosphate
  modified_base 9: mod_base = OTHER; note = 2'-O-methylguanosine-3'-phosphate
  modified_base 10: mod_base = OTHER; note = 2'-O-methylguanosine-3'-phosphate
  modified_base 11: mod_base = OTHER; note = 2'-O-methylguanosine-3'-phosphate
  modified_base 12: mod_base = OTHER; note = 2'-O-methyladenosine-3'-phosphate
  modified_base 13: mod_base = OTHER; note = 2'-O-methylcytidine-3'-phosphate
  modified_base 14: mod_base = OTHER; note = 2'-deoxy-2'-fluorocytidine-3'-phosphate
  modified_base 15: mod_base = OTHER; note = 2'-O-methylcytidine-3'-phosphate
  modified_base 16: mod_base = OTHER; note = 2'-deoxy-2'-fluorouridine-3'-phosphate
  modified_base 17: mod_base = OTHER; note = 2'-O-methylcytidine-3'-phosphate
  modified_base 18: mod_base = OTHER; note = 2'-O-methyluridine-3'-phosphate
  modified_base 19: mod_base = OTHER; note = 2'-O-methylguanosine-3'-phosphate
  modified_base 20: mod_base = OTHER; note = 2'-O-methylcytidine-3'-phosphate
  modified_base 21: mod_base = OTHER; note = 2'-O-methyladenosine-3'-phosphorothioate
  modified_base 22: mod_base = OTHER; note = 2'-O-methylcytidine-3'-phosphorothioate
  modified_base 23: mod_base = OTHER; note = 2'-O-methyluridine
atcagtaagggaccctctgcact

SEQ ID NO: 1093 - DNA, 23 bp, synthetic construct
  source 1..23: mol_type = other DNA
  modified_base 1: mod_base = OTHER; note = 2'-O-methyladenosine-3'-phosphorothioate
  modified_base 2: mod_base = OTHER; note = 2'-deoxy-2'-fluoroguanosine-3'-phosphorothioate
  modified_base 3: mod_base = OTHER; note = 2'-O-methyluridine-3'-phosphate
  modified_base 4: mod_base = OTHER; note = 2'-O-methylcytidine-3'-phosphate
  modified_base 6: mod_base = OTHER; note = 2'-O-methylguanosine-3'-phosphate
  modified_base 7: mod_base = OTHER; note = Thymidine-glycol nucleic acid (GNA), S-Isomer
  modified_base 8: mod_base = OTHER; note = 2'-O-methyladenosine-3'-phosphate
  modified_base 9: mod_base = OTHER; note = 2'-O-methyladenosine-3'-phosphate
  modified_base 10: mod_base = OTHER; note = 2'-O-methylguanosine-3'-phosphate
  modified_base 11: mod_base = OTHER; note = 2'-O-methylguanosine-3'-phosphate
  modified_base 12: mod_base = OTHER; note = 2'-O-methylguanosine-3'-phosphate
  modified_base 13: mod_base = OTHER; note = 2'-O-methyladenosine-3'-phosphate
  modified_base 14: mod_base = OTHER; note = 2'-deoxy-2'-fluorocytidine-3'-phosphate
  modified_base 15: mod_base = OTHER; note = 2'-O-methylcytidine-3'-phosphate
  modified_base 16: mod_base = OTHER; note = 2'-deoxy-2'-fluorocytidine-3'-phosphate
  modified_base 17: mod_base = OTHER; note = 2'-O-methyluridine-3'-phosphate
  modified_base 18: mod_base = OTHER; note = 2'-O-methylcytidine-3'-phosphate
  modified_base 19: mod_base = OTHER; note = 2'-O-methyluridine-3'-phosphate
  modified_base 20: mod_base = OTHER; note = 2'-O-methylguanosine-3'-phosphate
  modified_base 21: mod_base = OTHER; note = 2'-O-methylcytidine-3'-phosphorothioate
  modified_base 22: mod_base = OTHER; note = 2'-O-methyladenosine-3'-phosphorothioate
  modified_base 23: mod_base = OTHER; note = 2'-O-methylcytidine
  misc_feature 1..4: note = RNA
  misc_feature 6..23: note = RNA
  misc_feature 5: note = DNA
agtcagtaagggaccctctgcac

SEQ ID NO: 1094 - RNA, 23 nt, synthetic construct
  source 1..23: mol_type = other RNA
  modified_base 1: mod_base = OTHER; note = 2'-O-methyladenosine-3'-phosphorothioate
  modified_base 2: mod_base = OTHER; note = 2'-deoxy-2'-fluorouridine-3'-phosphorothioate
  modified_base 3: mod_base = OTHER; note = 2'-O-methylguanosine-3'-phosphate
  modified_base 4: mod_base = OTHER; note = 2'-O-methylguanosine-3'-phosphate
  modified_base 5: mod_base = OTHER; note = 2'-O-methyladenosine-3'-phosphate
  modified_base 6: mod_base = OTHER; note = 2'-deoxy-2'-fluoroadenosine-3'-phosphate
  modified_base 7: mod_base = OTHER; note = 2'-O-methylcytidine-3'-phosphate
  modified_base 8: mod_base = OTHER; note = 2'-O-methyladenosine-3'-phosphate
  modified_base 9: mod_base = OTHER; note = 2'-O-methylguanosine-3'-phosphate
  modified_base 10: mod_base = OTHER; note = 2'-O-methyluridine-3'-phosphate
  modified_base 11: mod_base = OTHER; note = 2'-O-methylcytidine-3'-phosphate
  modified_base 12: mod_base = OTHER; note = 2'-O-methyluridine-3'-phosphate
  modified_base 13: mod_base = OTHER; note = 2'-O-methylguanosine-3'-phosphate
  modified_base 14: mod_base = OTHER; note = 2'-deoxy-2'-fluoroadenosine-3'-phosphate
  modified_base 15: mod_base = OTHER; note = 2'-O-methylcytidine-3'-phosphate
  modified_base 16: mod_base = OTHER; note = 2'-deoxy-2'-fluorocytidine-3'-phosphate
  modified_base 17: mod_base = OTHER; note = 2'-O-methyladenosine-3'-phosphate
  modified_base 18: mod_base = OTHER; note = 2'-O-methyluridine-3'-phosphate
  modified_base 19: mod_base = OTHER; note = 2'-O-methyluridine-3'-phosphate
  modified_base 20: mod_base = OTHER; note = 2'-O-methyladenosine-3'-phosphate
  modified_base 21: mod_base = OTHER; note = 2'-O-methyladenosine-3'-phosphorothioate
  modified_base 22: mod_base = OTHER; note = 2'-O-methyluridine-3'-phosphorothioate
  modified_base 23: mod_base = OTHER; note = 2'-O-methyladenosine
atggaacagtctgaccattaata

SEQ ID NO: 1095 - RNA, 23 nt, synthetic construct
  source 1..23: mol_type = other RNA
  modified_base 1: mod_base = OTHER; note = 2'-O-methyladenosine-3'-phosphorothioate
  modified_base 2: mod_base = OTHER; note = 2'-deoxy-2'-fluorocytidine-3'-phosphorothioate
  modified_base 3: mod_base = OTHER; note = 2'-O-methyluridine-3'-phosphate
  modified_base 4: mod_base = OTHER; note = 2'-O-methylguanosine-3'-phosphate
  modified_base 5: mod_base = OTHER; note = 2'-O-methylguanosine-3'-phosphate
  modified_base 6: mod_base = OTHER; note = 2'-deoxy-2'-fluoroadenosine-3'-phosphate
  modified_base 7: mod_base = OTHER; note = 2'-O-methyladenosine-3'-phosphate
  modified_base 8: mod_base = OTHER; note = 2'-O-methylcytidine-3'-phosphate
  modified_base 9: mod_base = OTHER; note = 2'-O-methyladenosine-3'-phosphate
  modified_base 10: mod_base = OTHER; note = 2'-O-methylguanosine-3'-phosphate
  modified_base 11: mod_base = OTHER; note = 2'-O-methyluridine-3'-phosphate
  modified_base 12: mod_base = OTHER; note = 2'-O-methylcytidine-3'-phosphate
  modified_base 13: mod_base = OTHER; note = 2'-O-methyluridine-3'-phosphate
  modified_base 14: mod_base = OTHER; note = 2'-deoxy-2'-fluoroguanosine-3'-phosphate
  modified_base 15: mod_base = OTHER; note = 2'-O-methyladenosine-3'-phosphate
  modified_base 16: mod_base = OTHER; note = 2'-deoxy-2'-fluorocytidine-3'-phosphate
  modified_base 17: mod_base = OTHER; note = 2'-O-methylcytidine-3'-phosphate
  modified_base 18: mod_base = OTHER; note = 2'-O-methyladenosine-3'-phosphate
  modified_base 19: mod_base = OTHER; note = 2'-O-methyluridine-3'-phosphate
  modified_base 20: mod_base = OTHER; note = 2'-O-methyluridine-3'-phosphate
  modified_base 21: mod_base = OTHER; note = 2'-O-methyladenosine-3'-phosphorothioate
  modified_base 22: mod_base = OTHER; note = 2'-O-methyladenosine-3'-phosphorothioate
  modified_base 23: mod_base = OTHER; note = 2'-O-methyluridine
actggaacagtctgaccattaat

SEQ ID NO: 1096 - RNA, 23 nt, synthetic construct
  source 1..23: mol_type = other RNA
  modified_base 1: mod_base = OTHER; note = 2'-O-methyladenosine-3'-phosphorothioate
  modified_base 2: mod_base = OTHER; note = 2'-deoxy-2'-fluorocytidine-3'-phosphorothioate
  modified_base 3: mod_base = OTHER; note = 2'-O-methyladenosine-3'-phosphate
  modified_base 4: mod_base = OTHER; note = 2'-O-methylcytidine-3'-phosphate
  modified_base 5: mod_base = OTHER; note = 2'-O-methylcytidine-3'-phosphate
  modified_base 6: mod_base = OTHER; note = 2'-deoxy-2'-fluorouridine-3'-phosphate
  modified_base 7: mod_base = OTHER; note = 2'-O-methylguanosine-3'-phosphate
  modified_base 8: mod_base = OTHER; note = 2'-O-methyladenosine-3'-phosphate
  modified_base 9: mod_base = OTHER; note = 2'-O-methylcytidine-3'-phosphate
  modified_base 10: mod_base = OTHER; note = 2'-O-methyladenosine-3'-phosphate
  modified_base 11: mod_base = OTHER; note = 2'-O-methylguanosine-3'-phosphate
  modified_base 12: mod_base = OTHER; note = 2'-O-methylguanosine-3'-phosphate
  modified_base 13: mod_base = OTHER; note = 2'-O-methylcytidine-3'-phosphate
  modified_base 14: mod_base = OTHER; note = 2'-deoxy-2'-fluoroadenosine-3'-phosphate
  modified_base 15: mod_base = OTHER; note = 2'-O-methylguanosine-3'-phosphate
  modified_base 16: mod_base = OTHER; note = 2'-deoxy-2'-fluorouridine-3'-phosphate
  modified_base 17: mod_base = OTHER; note = 2'-O-methylguanosine-3'-phosphate
  modified_base 18: mod_base = OTHER; note = 2'-O-methyluridine-3'-phosphate
  modified_base 19: mod_base = OTHER; note = 2'-O-methylcytidine-3'-phosphate
  modified_base 20: mod_base = OTHER; note = 2'-O-methylguanosine-3'-phosphate
  modified_base 21: mod_base = OTHER; note = 2'-O-methyluridine-3'-phosphorothioate
  modified_base 22: mod_base = OTHER; note = 2'-O-methyluridine-3'-phosphorothioate
  modified_base 23: mod_base = OTHER; note = 2'-O-methylcytidine
acacctgacaggcagtgtcgttc

SEQ ID NO: 1097 - RNA, 23 nt, synthetic construct
  source 1..23: mol_type = other RNA
  modified_base 1: mod_base = OTHER; note = 2'-O-methyladenosine-3'-phosphorothioate
  modified_base 2: mod_base = OTHER; note = 2'-deoxy-2'-fluorouridine-3'-phosphorothioate
  modified_base 3: mod_base = OTHER; note = 2'-O-methyladenosine-3'-phosphate
  modified_base 4: mod_base = OTHER; note = 2'-O-methylguanosine-3'-phosphate
  modified_base 5: mod_base = OTHER; note = 2'-O-methyluridine-3'-phosphate
  modified_base 6: mod_base = OTHER; note = 2'-deoxy-2'-fluorouridine-3'-phosphate
  modified_base 7: mod_base = OTHER; note = 2'-O-methyladenosine-3'-phosphate
  modified_base 8: mod_base = OTHER; note = 2'-O-methylguanosine-3'-phosphate
  modified_base 9: mod_base = OTHER; note = 2'-O-methylguanosine-3'-phosphate
  modified_base 10: mod_base = OTHER; note = 2'-O-methyluridine-3'-phosphate
  modified_base 11: mod_base = OTHER; note = 2'-O-methylguanosine-3'-phosphate
  modified_base 12: mod_base = OTHER; note = 2'-O-methyladenosine-3'-phosphate
  modified_base 13: mod_base = OTHER; note = 2'-O-methyladenosine-3'-phosphate
  modified_base 14: mod_base = OTHER; note = 2'-deoxy-2'-fluoroadenosine-3'-phosphate
  modified_base 15: mod_base = OTHER; note = 2'-O-methyladenosine-3'-phosphate
  modified_base 16: mod_base = OTHER; note = 2'-deoxy-2'-fluoroadenosine-3'-phosphate
  modified_base 17: mod_base = OTHER; note = 2'-O-methylguanosine-3'-phosphate
  modified_base 18: mod_base = OTHER; note = 2'-O-methylguanosine-3'-phosphate
  modified_base 19: mod_base = OTHER; note = 2'-O-methyluridine-3'-phosphate
  modified_base 20: mod_base = OTHER; note = 2'-O-methylguanosine-3'-phosphate
  modified_base 21: mod_base = OTHER; note = 2'-O-methyluridine-3'-phosphorothioate
  modified_base 22: mod_base = OTHER; note = 2'-O-methyluridine-3'-phosphorothioate
  modified_base 23: mod_base = OTHER; note = 2'-O-methylcytidine
atagttaggtgaaaaaggtgttc

SEQ ID NO: 1098 - DNA, 23 bp, synthetic construct
  source 1..23: mol_type = other DNA
  modified_base 1: mod_base = OTHER; note = 2'-O-methyladenosine-3'-phosphorothioate
  modified_base 2: mod_base = OTHER; note = 2'-deoxy-2'-fluorouridine-3'-phosphorothioate
  modified_base 3: mod_base = OTHER; note = 2'-O-methyluridine-3'-phosphate
  modified_base 4: mod_base = OTHER; note = 2'-O-methyladenosine-3'-phosphate
  modified_base 6: mod_base = OTHER; note = 2'-O-methyluridine-3'-phosphate
  modified_base 7: mod_base = OTHER; note = Thymidine-glycol nucleic acid (GNA), S-Isomer
  modified_base 8: mod_base = OTHER; note = 2'-O-methyladenosine-3'-phosphate
  modified_base 9: mod_base = OTHER; note = 2'-O-methylguanosine-3'-phosphate
  modified_base 10: mod_base = OTHER; note = 2'-O-methylguanosine-3'-phosphate
  modified_base 11: mod_base = OTHER; note = 2'-O-methyluridine-3'-phosphate
  modified_base 12: mod_base = OTHER; note = 2'-O-methylguanosine-3'-phosphate
  modified_base 13: mod_base = OTHER; note = 2'-O-methyladenosine-3'-phosphate
  modified_base 14: mod_base = OTHER; note = 2'-deoxy-2'-fluoroadenosine-3'-phosphate
  modified_base 15: mod_base = OTHER; note = 2'-O-methyladenosine-3'-phosphate
  modified_base 16: mod_base = OTHER; note = 2'-deoxy-2'-fluoroadenosine-3'-phosphate
  modified_base 17: mod_base = OTHER; note = 2'-O-methyladenosine-3'-phosphate
  modified_base 18: mod_base = OTHER; note = 2'-O-methylguanosine-3'-phosphate
  modified_base 19: mod_base = OTHER; note = 2'-O-methylguanosine-3'-phosphate
  modified_base 20: mod_base = OTHER; note = 2'-O-methyluridine-3'-phosphate
  modified_base 21: mod_base = OTHER; note = 2'-O-methylguanosine-3'-phosphorothioate
  modified_base 22: mod_base = OTHER; note = 2'-O-methyluridine-3'-phosphorothioate
  modified_base 23: mod_base = OTHER; note = 2'-O-methyluridine
  misc_feature 1..4: note = RNA
  misc_feature 6..23: note = RNA
  misc_feature 5: note = DNA
attagttaggtgaaaaaggtgtt

SEQ ID NO: 1099 - DNA, 23 bp, synthetic construct
  source 1..23: mol_type = other DNA
  modified_base 1: mod_base = OTHER; note = 2'-O-methyladenosine-3'-phosphorothioate
  modified_base 2: mod_base = OTHER; note = 2'-deoxy-2'-fluorouridine-3'-phosphorothioate
  modified_base 3: mod_base = OTHER; note = 2'-O-methyluridine-3'-phosphate
  modified_base 4: mod_base = OTHER; note = 2'-O-methyluridine-3'-phosphate
  modified_base 6: mod_base = OTHER; note = 2'-O-methylguanosine-3'-phosphate
  modified_base 7: mod_base = OTHER; note = Thymidine-glycol nucleic acid (GNA), S-Isomer
  modified_base 8: mod_base = OTHER; note = 2'-O-methyluridine-3'-phosphate
  modified_base 9: mod_base = OTHER; note = 2'-O-methyladenosine-3'-phosphate
  modified_base 10: mod_base = OTHER; note = 2'-O-methylguanosine-3'-phosphate
  modified_base 11: mod_base = OTHER; note = 2'-O-methylguanosine-3'-phosphate
  modified_base 12: mod_base = OTHER; note = 2'-O-methyluridine-3'-phosphate
  modified_base 13: mod_base = OTHER; note = 2'-O-methylguanosine-3'-phosphate
  modified_base 14: mod_base = OTHER; note = 2'-deoxy-2'-fluoroadenosine-3'-phosphate
  modified_base 15: mod_base = OTHER; note = 2'-O-methyladenosine-3'-phosphate
  modified_base 16: mod_base = OTHER; note = 2'-deoxy-2'-fluoroadenosine-3'-phosphate
  modified_base 17: mod_base = OTHER; note = 2'-O-methyladenosine-3'-phosphate
  modified_base 18: mod_base = OTHER; note = 2'-O-methyladenosine-3'-phosphate
  modified_base 19: mod_base = OTHER; note = 2'-O-methylguanosine-3'-phosphate
  modified_base 20: mod_base = OTHER; note = 2'-O-methylguanosine-3'-phosphate
  modified_base 21: mod_base = OTHER; note = 2'-O-methyluridine-3'-phosphorothioate
  modified_base 22: mod_base = OTHER; note = 2'-O-methylguanosine-3'-phosphorothioate
  modified_base 23: mod_base = OTHER; note = 2'-O-methyluridine
  misc_feature 1..4: note = RNA
  misc_feature 6..23: note = RNA
  misc_feature 5: note = DNA
atttagttaggtgaaaaaggtgt

SEQ ID NO: 1100 - RNA, 23 nt, synthetic construct
  source 1..23: mol_type = other RNA
  modified_base 1: mod_base = OTHER; note = 2'-O-methyladenosine-3'-phosphorothioate
  modified_base 2: mod_base = OTHER; note = 2'-deoxy-2'-fluoroadenosine-3'-phosphorothioate
  modified_base 3: mod_base = OTHER; note = 2'-O-methyluridine-3'-phosphate
  modified_base 4: mod_base = OTHER; note = 2'-O-methyluridine-3'-phosphate
  modified_base 5: mod_base = OTHER; note = 2'-O-methyluridine-3'-phosphate
  modified_base 6: mod_base = OTHER; note = 2'-deoxy-2'-fluorouridine-3'-phosphate
  modified_base 7: mod_base = OTHER; note = 2'-O-methyladenosine-3'-phosphate
  modified_base 8: mod_base = OTHER; note = 2'-O-methylguanosine-3'-phosphate
  modified_base 9: mod_base = OTHER; note = 2'-O-methyluridine-3'-phosphate
  modified_base 10: mod_base = OTHER; note = 2'-O-methyluridine-3'-phosphate
  modified_base 11: mod_base = OTHER; note = 2'-O-methyladenosine-3'-phosphate
  modified_base 12: mod_base = OTHER; note = 2'-O-methylguanosine-3'-phosphate
  modified_base 13: mod_base = OTHER; note = 2'-O-methylguanosine-3'-phosphate
  modified_base 14: mod_base = OTHER; note = 2'-deoxy-2'-fluorouridine-3'-phosphate
  modified_base 15: mod_base = OTHER; note = 2'-O-methylguanosine-3'-phosphate
  modified_base 16: mod_base = OTHER; note = 2'-deoxy-2'-fluoroadenosine-3'-phosphate
  modified_base 17: mod_base = OTHER; note = 2'-O-methyladenosine-3'-phosphate
  modified_base 18: mod_base = OTHER; note = 2'-O-methyladenosine-3'-phosphate
  modified_base 19: mod_base = OTHER; note = 2'-O-methyladenosine-3'-phosphate
  modified_base 20: mod_base = OTHER; note = 2'-O-methyladenosine-3'-phosphate
  modified_base 21: mod_base = OTHER; note = 2'-O-methylguanosine-3'-phosphorothioate
  modified_base 22: mod_base = OTHER; note = 2'-O-methylguanosine-3'-phosphorothioate
  modified_base 23: mod_base = OTHER; note = 2'-O-methyluridine
aattttagttaggtgaaaaaggt

SEQ ID NO: 1101 - RNA, 23 nt, synthetic construct
  source 1..23: mol_type = other RNA
  modified_base 1: mod_base = OTHER; note = 2'-O-methyladenosine-3'-phosphorothioate
  modified_base 2: mod_base = OTHER; note = 2'-deoxy-2'-fluorouridine-3'-phosphorothioate
  modified_base 3: mod_base = OTHER; note = 2'-O-methyladenosine-3'-phosphate
  modified_base 4: mod_base = OTHER; note = 2'-O-methyluridine-3'-phosphate
  modified_base 5: mod_base = OTHER; note = 2'-O-methyluridine-3'-phosphate
  modified_base 6: mod_base = OTHER; note = 2'-deoxy-2'-fluorouridine-3'-phosphate
  modified_base 7: mod_base = OTHER; note = 2'-O-methyluridine-3'-phosphate
  modified_base 8: mod_base = OTHER; note = 2'-O-methyladenosine-3'-phosphate
  modified_base 9: mod_base = OTHER; note = 2'-O-methylguanosine-3'-phosphate
  modified_base 10: mod_base = OTHER; note = 2'-O-methyluridine-3'-phosphate
  modified_base 11: mod_base = OTHER; note = 2'-O-methyluridine-3'-phosphate
  modified_base 12: mod_base = OTHER; note = 2'-O-methyladenosine-3'-phosphate
  modified_base 13: mod_base = OTHER; note = 2'-O-methylguanosine-3'-phosphate
  modified_base 14: mod_base = OTHER; note = 2'-deoxy-2'-fluoroguanosine-3'-phosphate
  modified_base 15: mod_base = OTHER; note = 2'-O-methyluridine-3'-phosphate
  modified_base 16: mod_base = OTHER; note = 2'-deoxy-2'-fluoroguanosine-3'-phosphate
  modified_base 17: mod_base = OTHER; note = 2'-O-methyladenosine-3'-phosphate
  modified_base 18: mod_base = OTHER; note = 2'-O-methyladenosine-3'-phosphate
  modified_base 19: mod_base = OTHER; note = 2'-O-methyladenosine-3'-phosphate
  modified_base 20: mod_base = OTHER; note = 2'-O-methyladenosine-3'-phosphate
  modified_base 21: mod_base = OTHER; note = 2'-O-methyladenosine-3'-phosphorothioate
  modified_base 22: mod_base = OTHER; note = 2'-O-methylguanosine-3'-phosphorothioate
  modified_base 23: mod_base = OTHER; note = 2'-O-methylguanosine
atattttagttaggtgaaaaagg

SEQ ID NO: 1102 - RNA, 23 nt, synthetic construct
  source 1..23: mol_type = other RNA
  modified_base 1: mod_base = OTHER; note = 2'-O-methyladenosine-3'-phosphorothioate
  modified_base 2: mod_base = OTHER; note = 2'-deoxy-2'-fluorouridine-3'-phosphorothioate
  modified_base 3: mod_base = OTHER; note = 2'-O-methyluridine-3'-phosphate
  modified_base 4: mod_base = OTHER; note = 2'-O-methyladenosine-3'-phosphate
  modified_base 5: mod_base = OTHER; note = 2'-O-methyluridine-3'-phosphate
  modified_base 6: mod_base = OTHER; note = 2'-deoxy-2'-fluorouridine-3'-phosphate
  modified_base 7: mod_base = OTHER; note = 2'-O-methyluridine-3'-phosphate
  modified_base 8: mod_base = OTHER; note = 2'-O-methyluridine-3'-phosphate
  modified_base 9: mod_base = OTHER; note = 2'-O-methyladenosine-3'-phosphate
  modified_base 10: mod_base = OTHER; note = 2'-O-methylguanosine-3'-phosphate
  modified_base 11: mod_base = OTHER; note = 2'-O-methyluridine-3'-phosphate
  modified_base 12: mod_base = OTHER; note = 2'-O-methyluridine-3'-phosphate
  modified_base 13: mod_base = OTHER; note = 2'-O-methyladenosine-3'-phosphate
  modified_base 14: mod_base = OTHER; note = 2'-deoxy-2'-fluoroguanosine-3'-phosphate
  modified_base 15: mod_base = OTHER; note = 2'-O-methylguanosine-3'-phosphate
  modified_base 16: mod_base = OTHER; note = 2'-deoxy-2'-fluorouridine-3'-phosphate
  modified_base 17: mod_base = OTHER; note = 2'-O-methylguanosine-3'-phosphate
  modified_base 18: mod_base = OTHER; note = 2'-O-methyladenosine-3'-phosphate
  modified_base 19: mod_base = OTHER; note = 2'-O-methyladenosine-3'-phosphate
  modified_base 20: mod_base = OTHER; note = 2'-O-methyladenosine-3'-phosphate
  modified_base 21: mod_base = OTHER; note = 2'-O-methyladenosine-3'-phosphorothioate
  modified_base 22: mod_base = OTHER; note = 2'-O-methyladenosine-3'-phosphorothioate
  modified_base 23: mod_base = OTHER; note = 2'-O-methylguanosine
attattttagttaggtgaaaaag

SEQ ID NO: 1103 - RNA, 23 nt, synthetic construct
  source 1..23: mol_type = other RNA
  modified_base 1: mod_base = OTHER; note = 2'-O-methyladenosine-3'-phosphorothioate
  modified_base 2: mod_base = OTHER; note = 2'-deoxy-2'-fluoroadenosine-3'-phosphorothioate
  modified_base 3: mod_base = OTHER; note = 2'-O-methyluridine-3'-phosphate
  modified_base 4: mod_base = OTHER; note = 2'-O-methyluridine-3'-phosphate
  modified_base 5: mod_base = OTHER; note = 2'-O-methyladenosine-3'-phosphate
  modified_base 6: mod_base = OTHER; note = 2'-deoxy-2'-fluorouridine-3'-phosphate
  modified_base 7: mod_base = OTHER; note = 2'-O-methyluridine-3'-phosphate
  modified_base 8: mod_base = OTHER; note = 2'-O-methyluridine-3'-phosphate
  modified_base 9: mod_base = OTHER; note = 2'-O-methyluridine-3'-phosphate
  modified_base 10: mod_base = OTHER; note = 2'-O-methyladenosine-3'-phosphate
  modified_base 11: mod_base = OTHER; note = 2'-O-methylguanosine-3'-phosphate
  modified_base 12: mod_base = OTHER; note = 2'-O-methyluridine-3'-phosphate
  modified_base 13: mod_base = OTHER; note = 2'-O-methyluridine-3'-phosphate
  modified_base 14: mod_base = OTHER; note = 2'-deoxy-2'-fluoroadenosine-3'-phosphate
  modified_base 15: mod_base = OTHER; note = 2'-O-methylguanosine-3'-phosphate
  modified_base 16: mod_base = OTHER; note = 2'-deoxy-2'-fluoroguanosine-3'-phosphate
  modified_base 17: mod_base = OTHER; note = 2'-O-methyluridine-3'-phosphate
  modified_base 18: mod_base = OTHER; note = 2'-O-methylguanosine-3'-phosphate
  modified_base 19: mod_base = OTHER; note = 2'-O-methyladenosine-3'-phosphate
  modified_base 20: mod_base = OTHER; note = 2'-O-methyladenosine-3'-phosphate
  modified_base 21: mod_base = OTHER; note = 2'-O-methyladenosine-3'-phosphorothioate
  modified_base 22: mod_base = OTHER; note = 2'-O-methyladenosine-3'-phosphorothioate
  modified_base 23: mod_base = OTHER; note = 2'-O-methyladenosine
aattattttagttaggtgaaaaa

SEQ ID NO: 1104 - RNA, 23 nt, synthetic construct
  source 1..23: mol_type = other RNA
  modified_base 1: mod_base = OTHER; note = 2'-O-methyladenosine-3'-phosphorothioate
  modified_base 2: mod_base = OTHER; note = 2'-deoxy-2'-fluorocytidine-3'-phosphorothioate
  modified_base 3: mod_base = OTHER; note = 2'-O-methyladenosine-3'-phosphate
  modified_base 4: mod_base = OTHER; note = 2'-O-methyluridine-3'-phosphate
  modified_base 5: mod_base = OTHER; note = 2'-O-methyluridine-3'-phosphate
  modified_base 6: mod_base = OTHER; note = 2'-deoxy-2'-fluoroadenosine-3'-phosphate
  modified_base 7: mod_base = OTHER; note = 2'-O-methyluridine-3'-phosphate
  modified_base 8: mod_base = OTHER; note = 2'-O-methyluridine-3'-phosphate
  modified_base 9: mod_base = OTHER; note = 2'-O-methyluridine-3'-phosphate
  modified_base 10: mod_base = OTHER; note = 2'-O-methyluridine-3'-phosphate
  modified_base 11: mod_base = OTHER; note = 2'-O-methyladenosine-3'-phosphate
  modified_base 12: mod_base = OTHER; note = 2'-O-methylguanosine-3'-phosphate
  modified_base 13: mod_base = OTHER; note = 2'-O-methyluridine-3'-phosphate
  modified_base 14: mod_base = OTHER; note = 2'-deoxy-2'-fluorouridine-3'-phosphate
  modified_base 15: mod_base = OTHER; note = 2'-O-methyladenosine-3'-phosphate
  modified_base 16: mod_base = OTHER; note = 2'-deoxy-2'-fluoroguanosine-3'-phosphate
  modified_base 17: mod_base = OTHER; note = 2'-O-methylguanosine-3'-phosphate
  modified_base 18: mod_base = OTHER; note = 2'-O-methyluridine-3'-phosphate
  modified_base 19: mod_base = OTHER; note = 2'-O-methylguanosine-3'-phosphate
  modified_base 20: mod_base = OTHER; note = 2'-O-methyladenosine-3'-phosphate
  modified_base 21: mod_base = OTHER; note = 2'-O-methyladenosine-3'-phosphorothioate
  modified_base 22: mod_base = OTHER; note = 2'-O-methyladenosine-3'-phosphorothioate
  modified_base 23: mod_base = OTHER; note = 2'-O-methyladenosine
acattattttagttaggtgaaaa

SEQ ID NO: 1105 - RNA, 23 nt, synthetic construct
  source 1..23: mol_type = other RNA
  modified_base 1: mod_base = OTHER; note = 2'-O-methyladenosine-3'-phosphorothioate
  modified_base 2: mod_base = OTHER; note = 2'-deoxy-2'-fluoroadenosine-3'-phosphorothioate
  modified_base 3: mod_base = OTHER; note = 2'-O-methylcytidine-3'-phosphate
  modified_base 4: mod_base = OTHER; note = 2'-O-methyladenosine-3'-phosphate
  modified_base 5: mod_base = OTHER; note = 2'-O-methyluridine-3'-phosphate
  modified_base 6: mod_base = OTHER; note = 2'-deoxy-2'-fluorouridine-3'-phosphate
  modified_base 7: mod_base = OTHER; note = 2'-O-methyladenosine-3'-phosphate
  modified_base 8: mod_base = OTHER; note = 2'-O-methyluridine-3'-phosphate
  modified_base 9: mod_base = OTHER; note = 2'-O-methyluridine-3'-phosphate
  modified_base 10: mod_base = OTHER; note = 2'-O-methyluridine-3'-phosphate
  modified_base 11: mod_base = OTHER; note = 2'-O-methyluridine-3'-phosphate
  modified_base 12: mod_base = OTHER; note = 2'-O-methyladenosine-3'-phosphate
  modified_base 13: mod_base = OTHER; note = 2'-O-methylguanosine-3'-phosphate
  modified_base 14: mod_base = OTHER; note = 2'-deoxy-2'-fluorouridine-3'-phosphate
  modified_base 15: mod_base = OTHER; note = 2'-O-methyluridine-3'-phosphate
  modified_base 16: mod_base = OTHER; note = 2'-deoxy-2'-fluoroadenosine-3'-phosphate
  modified_base 17: mod_base = OTHER; note = 2'-O-methylguanosine-3'-phosphate
  modified_base 18: mod_base = OTHER; note = 2'-O-methylguanosine-3'-phosphate
  modified_base 19: mod_base = OTHER; note = 2'-O-methyluridine-3'-phosphate
  modified_base 20: mod_base = OTHER; note = 2'-O-methylguanosine-3'-phosphate
  modified_base 21: mod_base = OTHER; note = 2'-O-methyladenosine-3'-phosphorothioate
  modified_base 22: mod_base = OTHER; note = 2'-O-methyladenosine-3'-phosphorothioate
  modified_base 23: mod_base = OTHER; note = 2'-O-methyladenosine
aacattattttagttaggtgaaa

SEQ ID NO: 1106 - RNA, 23 nt, synthetic construct
  source 1..23: mol_type = other RNA
  modified_base 1: mod_base = OTHER; note = 2'-O-methyladenosine-3'-phosphorothioate
  modified_base 2: mod_base = OTHER; note = 2'-deoxy-2'-fluoroadenosine-3'-phosphorothioate
  modified_base 3: mod_base = OTHER; note = 2'-O-methyladenosine-3'-phosphate
  modified_base 4: mod_base = OTHER; note = 2'-O-methylcytidine-3'-phosphate
  modified_base 5: mod_base = OTHER; note = 2'-O-methyladenosine-3'-phosphate
  modified_base 6: mod_base = OTHER; note = 2'-deoxy-2'-fluorouridine-3'-phosphate
  modified_base 7: mod_base = OTHER; note = 2'-O-methyluridine-3'-phosphate
  modified_base 8: mod_base = OTHER; note = 2'-O-methyladenosine-3'-phosphate
  modified_base 9: mod_base = OTHER; note = 2'-O-methyluridine-3'-phosphate
  modified_base 10: mod_base = OTHER; note = 2'-O-methyluridine-3'-phosphate
  modified_base 11: mod_base = OTHER; note = 2'-O-methyluridine-3'-phosphate
  modified_base 12: mod_base = OTHER; note = 2'-O-methyluridine-3'-phosphate
  modified_base 13: mod_base = OTHER; note = 2'-O-methyladenosine-3'-phosphate
  modified_base 14: mod_base = OTHER; note = 2'-deoxy-2'-fluoroguanosine-3'-phosphate
  modified_base 15: mod_base = OTHER; note = 2'-O-methyluridine-3'-phosphate
  modified_base 16: mod_base = OTHER; note = 2'-deoxy-2'-fluorouridine-3'-phosphate
  modified_base 17: mod_base = OTHER; note = 2'-O-methyladenosine-3'-phosphate
  modified_base 18: mod_base = OTHER; note = 2'-O-methylguanosine-3'-phosphate
  modified_base 19: mod_base = OTHER; note = 2'-O-methylguanosine-3'-phosphate
  modified_base 20: mod_base = OTHER; note = 2'-O-methyluridine-3'-phosphate
  modified_base 21: mod_base = OTHER; note = 2'-O-methylguanosine-3'-phosphorothioate
  modified_base 22: mod_base = OTHER; note = 2'-O-methyladenosine-3'-phosphorothioate
  modified_base 23: mod_base = OTHER; note = 2'-O-methyladenosine
aaacattattttagttaggtgaa

SEQ ID NO: 1107 - RNA, 23 nt, synthetic construct
  source 1..23: mol_type = other RNA
  modified_base 1: mod_base = OTHER; note = 2'-O-methyladenosine-3'-phosphorothioate
  modified_base 2: mod_base = OTHER; note = 2'-deoxy-2'-fluoroadenosine-3'-phosphorothioate
  modified_base 3: mod_base = OTHER; note = 2'-O-methyladenosine-3'-phosphate
  modified_base 4: mod_base = OTHER; note = 2'-O-methyladenosine-3'-phosphate
  modified_base 5: mod_base = OTHER; note = 2'-O-methylcytidine-3'-phosphate
  modified_base 6: mod_base = OTHER; note = 2'-deoxy-2'-fluoroadenosine-3'-phosphate
  modified_base 7: mod_base = OTHER; note = 2'-O-methyluridine-3'-phosphate
  modified_base 8: mod_base = OTHER; note = 2'-O-methyluridine-3'-phosphate
  modified_base 9: mod_base = OTHER; note = 2'-O-methyladenosine-3'-phosphate
  modified_base 10: mod_base = OTHER; note = 2'-O-methyluridine-3'-phosphate
  modified_base 11: mod_base = OTHER; note = 2'-O-methyluridine-3'-phosphate
  modified_base 12: mod_base = OTHER; note = 2'-O-methyluridine-3'-phosphate
  modified_base 13: mod_base = OTHER; note = 2'-O-methyluridine-3'-phosphate
  modified_base 14: mod_base = OTHER; note = 2'-deoxy-2'-fluoroadenosine-3'-phosphate
  modified_base 15: mod_base = OTHER; note = 2'-O-methylguanosine-3'-phosphate
  modified_base 16: mod_base = OTHER; note = 2'-deoxy-2'-fluorouridine-3'-phosphate
  modified_base 17: mod_base = OTHER; note = 2'-O-methyluridine-3'-phosphate
  modified_base 18: mod_base = OTHER; note = 2'-O-methyladenosine-3'-phosphate
  modified_base 19: mod_base = OTHER; note = 2'-O-methylguanosine-3'-phosphate
  modified_base 20: mod_base = OTHER; note = 2'-O-methylguanosine-3'-phosphate
  modified_base 21: mod_base = OTHER; note = 2'-O-methyluridine-3'-phosphorothioate
  modified_base 22: mod_base = OTHER; note = 2'-O-methylguanosine-3'-phosphorothioate
  modified_base 23: mod_base = OTHER; note = 2'-O-methyladenosine
aaaacattattttagttaggtga

SEQ ID NO: 1108 - RNA, 23 nt, synthetic construct
  source 1..23: mol_type = other RNA
  modified_base 1: mod_base = OTHER; note = 2'-O-methyladenosine-3'-phosphorothioate
  modified_base 2: mod_base = OTHER; note = 2'-deoxy-2'-fluorouridine-3'-phosphorothioate
  modified_base 3: mod_base = OTHER; note = 2'-O-methyladenosine-3'-phosphate
  modified_base 4: mod_base = OTHER; note = 2'-O-methyladenosine-3'-phosphate
  modified_base 5: mod_base = OTHER; note = 2'-O-methyladenosine-3'-phosphate
  modified_base 6: mod_base = OTHER; note = 2'-deoxy-2'-fluorocytidine-3'-phosphate
  modified_base 7: mod_base = OTHER; note = 2'-O-methyladenosine-3'-phosphate
  modified_base 8: mod_base = OTHER; note = 2'-O-methyluridine-3'-phosphate
  modified_base 9: mod_base = OTHER; note = 2'-O-methyluridine-3'-phosphate
  modified_base 10: mod_base = OTHER; note = 2'-O-methyladenosine-3'-phosphate
  modified_base 11: mod_base = OTHER; note = 2'-O-methyluridine-3'-phosphate
  modified_base 12: mod_base = OTHER; note = 2'-O-methyluridine-3'-phosphate
  modified_base 13: mod_base = OTHER; note = 2'-O-methyluridine-3'-phosphate
  modified_base 14: mod_base = OTHER; note = 2'-deoxy-2'-fluorouridine-3'-phosphate
  modified_base 15: mod_base = OTHER; note = 2'-O-methyladenosine-3'-phosphate
  modified_base 16: mod_base = OTHER; note = 2'-deoxy-2'-fluoroguanosine-3'-phosphate
  modified_base 17: mod_base = OTHER; note = 2'-O-methyluridine-3'-phosphate
  modified_base 18: mod_base = OTHER; note = 2'-O-methyluridine-3'-phosphate
  modified_base 19: mod_base = OTHER; note = 2'-O-methyladenosine-3'-phosphate
  modified_base 20: mod_base = OTHER; note = 2'-O-methylguanosine-3'-phosphate
  modified_base 21: mod_base = OTHER; note = 2'-O-methylguanosine-3'-phosphorothioate
  modified_base 22: mod_base = OTHER; note = 2'-O-methyluridine-3'-phosphorothioate
  modified_base 23: mod_base = OTHER; note = 2'-O-methylguanosine
ataaacattattttagttaggtg

SEQ ID NO: 1109 - DNA, 23 bp, synthetic construct
  source 1..23: mol_type = other DNA
  modified_base 1: mod_base = OTHER; note = 2'-O-methyladenosine-3'-phosphorothioate
  modified_base 2: mod_base = OTHER; note = 2'-deoxy-2'-fluorouridine-3'-phosphorothioate
  modified_base 3: mod_base = OTHER; note = 2'-O-methyladenosine-3'-phosphate
  modified_base 4: mod_base = OTHER; note = 2'-O-methyladenosine-3'-phosphate
  modified_base 6: mod_base = OTHER; note = 2'-O-methylcytidine-3'-phosphate
  modified_base 7: mod_base = OTHER; note = Adenosine-glycol nucleic acid (GNA), S-isomer
  modified_base 8: mod_base = OTHER; note = 2'-O-methyluridine-3'-phosphate
  modified_base 9: mod_base = OTHER; note = 2'-O-methyluridine-3'-phosphate
  modified_base 10: mod_base = OTHER; note = 2'-O-methyladenosine-3'-phosphate
  modified_base 11: mod_base = OTHER; note = 2'-O-methyluridine-3'-phosphate
  modified_base 12: mod_base = OTHER; note = 2'-O-methyluridine-3'-phosphate
  modified_base 13: mod_base = OTHER; note = 2'-O-methyluridine-3'-phosphate
  modified_base 14: mod_base = OTHER; note = 2'-deoxy-2'-fluorouridine-3'-phosphate
  modified_base 15: mod_base = OTHER; note = 2'-O-methyladenosine-3'-phosphate
  modified_base 16: mod_base = OTHER; note = 2'-deoxy-2'-fluoroguanosine-3'-phosphate
  modified_base 17: mod_base = OTHER; note = 2'-O-methyluridine-3'-phosphate
  modified_base 18: mod_base = OTHER; note = 2'-O-methyluridine-3'-phosphate
  modified_base 19: mod_base = OTHER; note = 2'-O-methyladenosine-3'-phosphate
  modified_base 20: mod_base = OTHER; note = 2'-O-methylguanosine-3'-phosphate
  modified_base 21: mod_base = OTHER; note = 2'-O-methylguanosine-3'-phosphorothioate
  modified_base 22: mod_base = OTHER; note = 2'-O-methyluridine-3'-phosphorothioate
  modified_base 23: mod_base = OTHER; note = 2'-O-methylguanosine
  misc_feature 1..4: note = RNA
  misc_feature 6..23: note = RNA
  misc_feature 5: note = DNA
ataaacattattttagttaggtg

SEQ ID NO: 1110 - RNA, 23 nt, synthetic construct
  source 1..23: mol_type = other RNA
  modified_base 1: mod_base = OTHER; note = 2'-O-methyladenosine-3'-phosphorothioate
  modified_base 2: mod_base = OTHER; note = 2'-deoxy-2'-fluorouridine-3'-phosphorothioate
  modified_base 3: mod_base = OTHER; note = 2'-O-methyluridine-3'-phosphate
  modified_base 4: mod_base = OTHER; note = 2'-O-methyladenosine-3'-phosphate
  modified_base 5: mod_base = OTHER; note = 2'-O-methyladenosine-3'-phosphate
  modified_base 6: mod_base = OTHER; note = 2'-deoxy-2'-fluoroadenosine-3'-phosphate
  modified_base 7: mod_base = OTHER; note = 2'-O-methylcytidine-3'-phosphate
  modified_base 8: mod_base = OTHER; note = 2'-O-methyladenosine-3'-phosphate
  modified_base 9: mod_base = OTHER; note = 2'-O-methyluridine-3'-phosphate
  modified_base 10: mod_base = OTHER; note = 2'-O-methyluridine-3'-phosphate
  modified_base 11: mod_base = OTHER; note = 2'-O-methyladenosine-3'-phosphate
  modified_base 12: mod_base = OTHER; note = 2'-O-methyluridine-3'-phosphate
  modified_base 13: mod_base = OTHER; note = 2'-O-methyluridine-3'-phosphate
  modified_base 14: mod_base = OTHER; note = 2'-deoxy-2'-fluorouridine-3'-phosphate
  modified_base 15: mod_base = OTHER; note = 2'-O-methyluridine-3'-phosphate
  modified_base 16: mod_base = OTHER; note = 2'-deoxy-2'-fluoroadenosine-3'-phosphate
  modified_base 17: mod_base = OTHER; note = 2'-O-methylguanosine-3'-phosphate
  modified_base 18: mod_base = OTHER; note = 2'-O-methyluridine-3'-phosphate
  modified_base 19: mod_base = OTHER; note = 2'-O-methyluridine-3'-phosphate
  modified_base 20: mod_base = OTHER; note = 2'-O-methyladenosine-3'-phosphate
  modified_base 21: mod_base = OTHER; note = 2'-O-methylguanosine-3'-phosphorothioate
  modified_base 22: mod_base = OTHER; note = 2'-O-methylguanosine-3'-phosphorothioate
  modified_base 23: mod_base = OTHER; note = 2'-O-methyluridine
attaaacattattttagttaggt

SEQ ID NO: 1111 - RNA, 23 nt, synthetic construct
  source 1..23: mol_type = other RNA
  modified_base 1: mod_base = OTHER; note = 2'-O-methyladenosine-3'-phosphorothioate
  modified_base 2: mod_base = OTHER; note = 2'-deoxy-2'-fluorouridine-3'-phosphorothioate
  modified_base 3: mod_base = OTHER; note = 2'-O-methyluridine-3'-phosphate
  modified_base 4: mod_base = OTHER; note = 2'-O-methyluridine-3'-phosphate
  modified_base 5: mod_base = OTHER; note = 2'-O-methyladenosine-3'-phosphate
  modified_base 6: mod_base = OTHER; note = 2'-deoxy-2'-fluoroadenosine-3'-phosphate
  modified_base 7: mod_base = OTHER; note = 2'-O-methyladenosine-3'-phosphate
  modified_base 8: mod_base = OTHER; note = 2'-O-methylcytidine-3'-phosphate
  modified_base 9: mod_base = OTHER; note = 2'-O-methyladenosine-3'-phosphate
  modified_base 10: mod_base = OTHER; note = 2'-O-methyluridine-3'-phosphate
  modified_base 11: mod_base = OTHER; note = 2'-O-methyluridine-3'-phosphate
  modified_base 12: mod_base = OTHER; note = 2'-O-methyladenosine-3'-phosphate
  modified_base 13: mod_base = OTHER; note = 2'-O-methyluridine-3'-phosphate
  modified_base 14: mod_base = OTHER; note = 2'-deoxy-2'-fluorouridine-3'-phosphate
  modified_base 15: mod_base = OTHER; note = 2'-O-methyluridine-3'-phosphate
  modified_base 16: mod_base = OTHER; note = 2'-deoxy-2'-fluorouridine-3'-phosphate
  modified_base 17: mod_base = OTHER; note = 2'-O-methyladenosine-3'-phosphate
  modified_base 18: mod_base = OTHER; note = 2'-O-methylguanosine-3'-phosphate
  modified_base 19: mod_base = OTHER; note = 2'-O-methyluridine-3'-phosphate
  modified_base 20: mod_base = OTHER; note = 2'-O-methyluridine-3'-phosphate
  modified_base 21: mod_base = OTHER; note = 2'-O-methyladenosine-3'-phosphorothioate
  modified_base 22: mod_base = OTHER; note = 2'-O-methylguanosine-3'-phosphorothioate
  modified_base 23: mod_base = OTHER; note = 2'-O-methylguanosine
atttaaacattattttagttagg

SEQ ID NO: 1112 - RNA, 23 nt, synthetic construct
  source 1..23: mol_type = other RNA
  modified_base 1: mod_base = OTHER; note = 2'-O-methyladenosine-3'-phosphorothioate
  modified_base 2: mod_base = OTHER; note = 2'-deoxy-2'-fluorocytidine-3'-phosphorothioate
  modified_base 3: mod_base = OTHER; note = 2'-O-methyluridine-3'-phosphate
  modified_base 4: mod_base = OTHER; note = 2'-O-methyluridine-3'-phosphate
  modified_base 5: mod_base = OTHER; note = 2'-O-methyluridine-3'-phosphate
  modified_base 6: mod_base = OTHER; note = 2'-deoxy-2'-fluoroadenosine-3'-phosphate
  modified_base 7: mod_base = OTHER; note = 2'-O-methyladenosine-3'-phosphate
  modified_base 8: mod_base = OTHER; note = 2'-O-methyladenosine-3'-phosphate
  modified_base 9: mod_base = OTHER; note = 2'-O-methylcytidine-3'-phosphate
  modified_base 10: mod_base = OTHER; note = 2'-O-methyladenosine-3'-phosphate
  modified_base 11: mod_base = OTHER; note = 2'-O-methyluridine-3'-phosphate
  modified_base 12: mod_base = OTHER; note = 2'-O-methyluridine-3'-phosphate
  modified_base 13: mod_base = OTHER; note = 2'-O-methyladenosine-3'-phosphate
  modified_base 14: mod_base = OTHER; note = 2'-deoxy-2'-fluorouridine-3'-phosphate
  modified_base 15: mod_base = OTHER; note = 2'-O-methyluridine-3'-phosphate
  modified_base 16: mod_base = OTHER; note = 2'-deoxy-2'-fluorouridine-3'-phosphate
  modified_base 17: mod_base = OTHER; note = 2'-O-methyluridine-3'-phosphate
  modified_base 18: mod_base = OTHER; note = 2'-O-methyladenosine-3'-phosphate
  modified_base 19: mod_base = OTHER; note = 2'-O-methylguanosine-3'-phosphate
  modified_base 20: mod_base = OTHER; note = 2'-O-methyluridine-3'-phosphate
  modified_base 21: mod_base = OTHER; note = 2'-O-methyluridine-3'-phosphorothioate
  modified_base 22: mod_base = OTHER; note = 2'-O-methyladenosine-3'-phosphorothioate
  modified_base 23: mod_base = OTHER; note = 2'-O-methylguanosine
actttaaacattattttagttag

SEQ ID NO: 1113 - RNA, 23 nt, synthetic construct
  source 1..23: mol_type = other RNA
  modified_base 1: mod_base = OTHER; note = 2'-O-methyladenosine-3'-phosphorothioate
  modified_base 2: mod_base = OTHER; note = 2'-deoxy-2'-fluorouridine-3'-phosphorothioate
  modified_base 3: mod_base = OTHER; note = 2'-O-methylcytidine-3'-phosphate
  modified_base 4: mod_base = OTHER; note = 2'-O-methyluridine-3'-phosphate
  modified_base 5: mod_base = OTHER; note = 2'-O-methyluridine-3'-phosphate
  modified_base 6: mod_base = OTHER; note = 2'-deoxy-2'-fluorouridine-3'-phosphate
  modified_base 7: mod_base = OTHER; note = 2'-O-methyladenosine-3'-phosphate
  modified_base 8: mod_base = OTHER; note = 2'-O-methyladenosine-3'-phosphate
  modified_base 9: mod_base = OTHER; note = 2'-O-methyladenosine-3'-phosphate
  modified_base 10: mod_base = OTHER; note = 2'-O-methylcytidine-3'-phosphate
  modified_base 11: mod_base = OTHER; note = 2'-O-methyladenosine-3'-phosphate
  modified_base 12: mod_base = OTHER; note = 2'-O-methyluridine-3'-phosphate
  modified_base 13: mod_base = OTHER; note = 2'-O-methyluridine-3'-phosphate
  modified_base 14: mod_base = OTHER; note = 2'-deoxy-2'-fluoroadenosine-3'-phosphate
  modified_base 15: mod_base = OTHER; note = 2'-O-methyluridine-3'-phosphate
  modified_base 16: mod_base = OTHER; note = 2'-deoxy-2'-fluorouridine-3'-phosphate
  modified_base 17: mod_base = OTHER; note = 2'-O-methyluridine-3'-phosphate
  modified_base 18: mod_base = OTHER; note = 2'-O-methyluridine-3'-phosphate
  modified_base 19: mod_base = OTHER; note = 2'-O-methyladenosine-3'-phosphate
  modified_base 20: mod_base = OTHER; note = 2'-O-methylguanosine-3'-phosphate
  modified_base 21: mod_base = OTHER; note = 2'-O-methyluridine-3'-phosphorothioate
  modified_base 22: mod_base = OTHER; note = 2'-O-methyluridine-3'-phosphorothioate
  modified_base 23: mod_base = OTHER; note = 2'-O-methyladenosine
atctttaaacattattttagtta

SEQ ID NO: 1114 - RNA, 23 nt, synthetic construct
  source 1..23: mol_type = other RNA
  modified_base 1: mod_base = OTHER; note = 2'-O-methyladenosine-3'-phosphorothioate
  modified_base 2: mod_base = OTHER; note = 2'-deoxy-2'-fluorouridine-3'-phosphorothioate
  modified_base 3: mod_base = OTHER; note = 2'-O-methyladenosine-3'-phosphate
  modified_base 4: mod_base = OTHER; note = 2'-O-methyladenosine-3'-phosphate
  modified_base 5: mod_base = OTHER; note = 2'-O-methyluridine-3'-phosphate
  modified_base 6: mod_base = OTHER; note = 2'-deoxy-2'-fluoroadenosine-3'-phosphate
  modified_base 7: mod_base = OTHER; note = 2'-O-methylcytidine-3'-phosphate
  modified_base 8: mod_base = OTHER; note = 2'-O-methyladenosine-3'-phosphate
  modified_base 9: mod_base = OTHER; note = 2'-O-methyladenosine-3'-phosphate
  modified_base 10: mod_base = OTHER; note = 2'-O-methyladenosine-3'-phosphate
  modified_base 11: mod_base = OTHER; note = 2'-O-methyladenosine-3'-phosphate
  modified_base 12: mod_base = OTHER; note = 2'-O-methyluridine-3'-phosphate
  modified_base 13: mod_base = OTHER; note = 2'-O-methyluridine-3'-phosphate
  modified_base 14: mod_base = OTHER; note = 2'-deoxy-2'-fluorocytidine-3'-phosphate
  modified_base 15: mod_base = OTHER; note = 2'-O-methyladenosine-3'-phosphate
  modified_base 16: mod_base = OTHER; note = 2'-deoxy-2'-fluoroadenosine-3'-phosphate
  modified_base 17: mod_base = OTHER; note = 2'-O-methylcytidine-3'-phosphate
  modified_base 18: mod_base = OTHER; note = 2'-O-methyladenosine-3'-phosphate
  modified_base 19: mod_base = OTHER; note = 2'-O-methylguanosine-3'-phosphate
  modified_base 20: mod_base = OTHER; note = 2'-O-methylguanosine-3'-phosphate
  modified_base 21: mod_base = OTHER; note = 2'-O-methyluridine-3'-phosphorothioate
  modified_base 22: mod_base = OTHER; note = 2'-O-methyladenosine-3'-phosphorothioate
  modified_base 23: mod_base = OTHER; note = 2'-O-methyladenosine
ataatacaaaattcaacaggtaa

SEQ ID NO: 1115 - RNA, 23 nt, synthetic construct
  source 1..23: mol_type = other RNA
  modified_base 1: mod_base = OTHER; note = 2'-O-methyladenosine-3'-phosphorothioate
  modified_base 2: mod_base = OTHER; note = 2'-deoxy-2'-fluoroadenosine-3'-phosphorothioate
  modified_base 3: mod_base = OTHER; note = 2'-O-methyluridine-3'-phosphate
  modified_base 4: mod_base = OTHER; note = 2'-O-methyladenosine-3'-phosphate
  modified_base 5: mod_base = OTHER; note = 2'-O-methyladenosine-3'-phosphate
  modified_base 6: mod_base = OTHER; note = 2'-deoxy-2'-fluorouridine-3'-phosphate
  modified_base 7: mod_base = OTHER; note = 2'-O-methyladenosine-3'-phosphate
  modified_base 8: mod_base = OTHER; note = 2'-O-methylcytidine-3'-phosphate
  modified_base 9: mod_base = OTHER; note = 2'-O-methyladenosine-3'-phosphate
  modified_base 10: mod_base = OTHER; note = 2'-O-methyladenosine-3'-phosphate
  modified_base 11: mod_base = OTHER; note = 2'-O-methyladenosine-3'-phosphate
  modified_base 12: mod_base = OTHER; note = 2'-O-methyladenosine-3'-phosphate
  modified_base 13: mod_base = OTHER; note = 2'-O-methyluridine-3'-phosphate
  modified_base 14: mod_base = OTHER; note = 2'-deoxy-2'-fluorouridine-3'-phosphate
  modified_base 15: mod_base = OTHER; note = 2'-O-methylcytidine-3'-phosphate
  modified_base 16: mod_base = OTHER; note = 2'-deoxy-2'-fluoroadenosine-3'-phosphate
  modified_base 17: mod_base = OTHER; note = 2'-O-methyladenosine-3'-phosphate
  modified_base 18: mod_base = OTHER; note = 2'-O-methylcytidine-3'-phosphate
  modified_base 19: mod_base = OTHER; note = 2'-O-methyladenosine-3'-phosphate
  modified_base 20: mod_base = OTHER; note = 2'-O-methylguanosine-3'-phosphate
  modified_base 21: mod_base = OTHER; note = 2'-O-methylguanosine-3'-phosphorothioate
  modified_base 22: mod_base = OTHER; note = 2'-O-methyluridine-3'-phosphorothioate
  modified_base 23: mod_base = OTHER; note = 2'-O-methyladenosine
aataatacaaaattcaacaggta

SEQ ID NO: 1116 - DNA, 23 bp, synthetic construct
  source 1..23: mol_type = other DNA
  modified_base 1: mod_base = OTHER; note = 2'-O-methyladenosine-3'-phosphorothioate
  modified_base 2: mod_base = OTHER; note = 2'-deoxy-2'-fluorouridine-3'-phosphorothioate
  modified_base 3: mod_base = OTHER; note = 2'-O-methyladenosine-3'-phosphate
  modified_base 4: mod_base = OTHER; note = 2'-O-methylguanosine-3'-phosphate
  modified_base 6: mod_base = OTHER; note = 2'-O-methyladenosine-3'-phosphate
  modified_base 7: mod_base = OTHER; note = guanosine-2'-phosphate
  modified_base 8: mod_base = OTHER; note = 2'-O-methylcytidine-3'-phosphate
  modified_base 9: mod_base = OTHER; note = 2'-O-methylcytidine-3'-phosphate
  modified_base 10: mod_base = OTHER; note = 2'-O-methylcytidine-3'-phosphate
  modified_base 11: mod_base = OTHER; note = 2'-O-methyladenosine-3'-phosphate
  modified_base 12: mod_base = OTHER; note = 2'-O-methylguanosine-3'-phosphate
  modified_base 13: mod_base = OTHER; note = 2'-O-methylguanosine-3'-phosphate
  modified_base 14: mod_base = OTHER; note = 2'-deoxy-2'-fluoroadenosine-3'-phosphate
  modified_base 15: mod_base = OTHER; note = 2'-O-methyladenosine-3'-phosphate
  modified_base 16: mod_base = OTHER; note = 2'-deoxy-2'-fluoroguanosine-3'-phosphate
  modified_base 17: mod_base = OTHER; note = 2'-O-methylcytidine-3'-phosphate
  modified_base 18: mod_base = OTHER; note = 2'-O-methylcytidine-3'-phosphate
  modified_base 19: mod_base = OTHER; note = 2'-O-methylguanosine-3'-phosphate
  modified_base 20: mod_base = OTHER; note = 2'-O-methylcytidine-3'-phosphate
  modified_base 21: mod_base = OTHER; note = 2'-O-methyladenosine-3'-phosphorothioate
  modified_base 22: mod_base = OTHER; note = 2'-O-methylguanosine-3'-phosphorothioate
  modified_base 23: mod_base = OTHER; note = 2'-O-methylcytidine
  misc_feature 1..4: note = RNA
  misc_feature 6..23: note = RNA
  misc_feature 5: note = DNA
atagaagcccaggaagccgcagc

SEQ ID NO: 1117 - DNA, 23 bp, synthetic construct
  source 1..23: mol_type = other DNA
  modified_base 1: mod_base = OTHER; note = 2'-O-methyladenosine-3'-phosphorothioate
  modified_base 2: mod_base = OTHER; note = 2'-deoxy-2'-fluoroadenosine-3'-phosphorothioate
  modified_base 3: mod_base = OTHER; note = 2'-O-methylcytidine-3'-phosphate
  modified_base 4: mod_base = OTHER; note = 2'-O-methylguanosine-3'-phosphate
  modified_base 6: mod_base = OTHER; note = 2'-O-methylguanosine-3'-phosphate
  modified_base 7: mod_base = OTHER; note = guanosine-2'-phosphate
  modified_base 8: mod_base = OTHER; note = 2'-O-methyluridine-3'-phosphate
  modified_base 9: mod_base = OTHER; note = 2'-O-methyladenosine-3'-phosphate
  modified_base 10: mod_base = OTHER; note = 2'-O-methylguanosine-3'-phosphate
  modified_base 11: mod_base = OTHER; note = 2'-O-methyladenosine-3'-phosphate
  modified_base 12: mod_base = OTHER; note = 2'-O-methyladenosine-3'-phosphate
  modified_base 13: mod_base = OTHER; note = 2'-O-methylguanosine-3'-phosphate
  modified_base 14: mod_base = OTHER; note = 2'-deoxy-2'-fluorocytidine-3'-phosphate
  modified_base 15: mod_base = OTHER; note = 2'-O-methylcytidine-3'-phosphate
  modified_base 16: mod_base = OTHER; note = 2'-deoxy-2'-fluorocytidine-3'-phosphate
  modified_base 17: mod_base = OTHER; note = 2'-O-methyladenosine-3'-phosphate
  modified_base 18: mod_base = OTHER; note = 2'-O-methylguanosine-3'-phosphate
  modified_base 19: mod_base = OTHER; note = 2'-O-methylguanosine-3'-phosphate
  modified_base 20: mod_base = OTHER; note = 2'-O-methyladenosine-3'-phosphate
  modified_base 21: mod_base = OTHER; note = 2'-O-methyladenosine-3'-phosphorothioate
  modified_base 22: mod_base = OTHER; note = 2'-O-methylguanosine-3'-phosphorothioate
  modified_base 23: mod_base = OTHER; note = 2'-O-methylcytidine
  misc_feature 1..4: note = RNA
  misc_feature 6..23: note = RNA
  misc_feature 5: note = DNA
aacgtggtagaagcccaggaagc

SEQ ID NO: 1118 - DNA, 23 bp, synthetic construct
  source 1..23: mol_type = other DNA
  modified_base 1: mod_base = OTHER; note = 2'-O-methyladenosine-3'-phosphorothioate
  modified_base 2: mod_base = OTHER; note = 2'-deoxy-2'-fluoroguanosine-3'-phosphorothioate
  modified_base 3: mod_base = OTHER; note = 2'-O-methylcytidine-3'-phosphate
  modified_base 4: mod_base = OTHER; note = 2'-O-methyladenosine-3'-phosphate
  modified_base 6: mod_base = OTHER; note = 2'-O-methyladenosine-3'-phosphate
  modified_base 7: mod_base = OTHER; note = guanosine-2'-phosphate
  modified_base 8: mod_base = OTHER; note = 2'-O-methyluridine-3'-phosphate
  modified_base 9: mod_base = OTHER; note = 2'-O-methylcytidine-3'-phosphate
  modified_base 10: mod_base = OTHER; note = 2'-O-methyluridine-3'-phosphate
  modified_base 11: mod_base = OTHER; note = 2'-O-methylguanosine-3'-phosphate
  modified_base 12: mod_base = OTHER; note = 2'-O-methylcytidine-3'-phosphate
  modified_base 13: mod_base = OTHER; note = 2'-O-methyluridine-3'-phosphate
  modified_base 14: mod_base = OTHER; note = 2'-deoxy-2'-fluorocytidine-3'-phosphate
  modified_base 15: mod_base = OTHER; note = 2'-O-methylcytidine-3'-phosphate
  modified_base 16: mod_base = OTHER; note = 2'-deoxy-2'-fluoroadenosine-3'-phosphate
  modified_base 17: mod_base = OTHER; note = 2'-O-methylguanosine-3'-phosphate
  modified_base 18: mod_base = OTHER; note = 2'-O-methylcytidine-3'-phosphate
  modified_base 19: mod_base = OTHER; note = 2'-O-methylguanosine-3'-phosphate
  modified_base 20: mod_base = OTHER; note = 2'-O-methylguanosine-3'-phosphate
  modified_base 21: mod_base = OTHER; note = 2'-O-methylguanosine-3'-phosphorothioate
  modified_base 22: mod_base = OTHER; note = 2'-O-methyladenosine-3'-phosphorothioate
  modified_base 23: mod_base = OTHER; note = 2'-O-methyluridine
  misc_feature 1..4: note = RNA
  misc_feature 6..23: note = RNA
  misc_feature 5: note = DNA
agcagagtctgctccagcgggat

SEQ ID NO: 1119 - DNA, 23 bp, synthetic construct
  source 1..23: mol_type = other DNA
  modified_base 1: mod_base = OTHER; note = 2'-O-methyladenosine-3'-phosphorothioate
  modified_base 2: mod_base = OTHER; note = 2'-deoxy-2'-fluoroguanosine-3'-phosphorothioate
  modified_base 3: mod_base = OTHER; note = 2'-O-methyladenosine-3'-phosphate
  modified_base 4: mod_base = OTHER; note = 2'-O-methylguanosine-3'-phosphate
  modified_base 6: mod_base = OTHER; note = 2'-O-methylguanosine-3'-phosphate
  modified_base 7: mod_base = OTHER; note = guanosine-2'-phosphate
  modified_base 8: mod_base = OTHER; note = 2'-O-methyladenosine-3'-phosphate
  modified_base 9: mod_base = OTHER; note = 2'-O-methylcytidine-3'-phosphate
  modified_base 10: mod_base = OTHER; note = 2'-O-methylcytidine-3'-phosphate
  modified_base 11: mod_base = OTHER; note = 2'-O-methyluridine-3'-phosphate
  modified_base 12: mod_base = OTHER; note = 2'-O-methylguanosine-3'-phosphate
  modified_base 13: mod_base = OTHER; note = 2'-O-methylcytidine-3'-phosphate
  modified_base 14: mod_base = OTHER; note = 2'-deoxy-2'-fluoroadenosine-3'-phosphate
  modified_base 15: mod_base = OTHER; note = 2'-O-methylguanosine-3'-phosphate
  modified_base 16: mod_base = OTHER; note = 2'-deoxy-2'-fluoroadenosine-3'-phosphate
  modified_base 17: mod_base = OTHER; note = 2'-O-methylguanosine-3'-phosphate
  modified_base 18: mod_base = OTHER; note = 2'-O-methyluridine-3'-phosphate
  modified_base 19: mod_base = OTHER; note = 2'-O-methylcytidine-3'-phosphate
  modified_base 20: mod_base = OTHER; note = 2'-O-methyluridine-3'-phosphate
  modified_base 21: mod_base = OTHER; note = 2'-O-methylguanosine-3'-phosphorothioate
  modified_base 22: mod_base = OTHER; note = 2'-O-methylcytidine-3'-phosphorothioate
  modified_base 23: mod_base = OTHER; note = 2'-O-methyluridine
  misc_feature 1..4: note = RNA
  misc_feature 6..23: note = RNA
  misc_feature 5: note = DNA
agagaggacctgcagagtctgct

SEQ ID NO: 1120 - DNA, 23 bp, synthetic construct
  source 1..23: mol_type = other DNA
  modified_base 1: mod_base = OTHER; note = 2'-O-methyladenosine-3'-phosphorothioate
  modified_base 2: mod_base = OTHER; note = 2'-deoxy-2'-fluorouridine-3'-phosphorothioate
  modified_base 3: mod_base = OTHER; note = 2'-O-methylcytidine-3'-phosphate
  modified_base 4: mod_base = OTHER; note = 2'-O-methyluridine-3'-phosphate
  modified_base 6: mod_base = OTHER; note = 2'-O-methyladenosine-3'-phosphate
  modified_base 7: mod_base = OTHER; note = guanosine-2'-phosphate
  modified_base 8: mod_base = OTHER; note = 2'-O-methyladenosine-3'-phosphate
  modified_base 9: mod_base = OTHER; note = 2'-O-methylguanosine-3'-phosphate
  modified_base 10: mod_base = OTHER; note = 2'-O-methylguanosine-3'-phosphate
  modified_base 11: mod_base = OTHER; note = 2'-O-methyladenosine-3'-phosphate
  modified_base 12: mod_base = OTHER; note = 2'-O-methylcytidine-3'-phosphate
  modified_base 13: mod_base = OTHER; note = 2'-O-methylcytidine-3'-phosphate
  modified_base 14: mod_base = OTHER; note = 2'-deoxy-2'-fluorouridine-3'-phosphate
  modified_base 15: mod_base = OTHER; note = 2'-O-methylguanosine-3'-phosphate
  modified_base 16: mod_base = OTHER; note = 2'-deoxy-2'-fluorocytidine-3'-phosphate
  modified_base 17: mod_base = OTHER; note = 2'-O-methyladenosine-3'-phosphate
  modified_base 18: mod_base = OTHER; note = 2'-O-methylguanosine-3'-phosphate
  modified_base 19: mod_base = OTHER; note = 2'-O-methyladenosine-3'-phosphate
  modified_base 20: mod_base = OTHER; note = 2'-O-methylguanosine-3'-phosphate
  modified_base 21: mod_base = OTHER; note = 2'-O-methyluridine-3'-phosphorothioate
  modified_base 22: mod_base = OTHER; note = 2'-O-methylcytidine-3'-phosphorothioate
  modified_base 23: mod_base = OTHER; note = 2'-O-methyluridine
  misc_feature 1..4: note = RNA
  misc_feature 6..23: note = RNA
  misc_feature 5: note = DNA
atctgagaggacctgcagagtct

SEQ ID NO: 1121 - DNA, 23 bp, synthetic construct
  source 1..23: mol_type = other DNA
  modified_base 1: mod_base = OTHER; note = 2'-O-methyladenosine-3'-phosphorothioate
  modified_base 2: mod_base = OTHER; note = 2'-deoxy-2'-fluoroguanosine-3'-phosphorothioate
  modified_base 3: mod_base = OTHER; note = 2'-O-methyladenosine-3'-phosphate
  modified_base 4: mod_base = OTHER; note = 2'-O-methyluridine-3'-phosphate
  modified_base 6: mod_base = OTHER; note = 2'-O-methyluridine-3'-phosphate
  modified_base 7: mod_base = OTHER; note = guanosine-2'-phosphate
  modified_base 8: mod_base = OTHER; note = 2'-O-methyladenosine-3'-phosphate
  modified_base 9: mod_base = OTHER; note = 2'-O-methylguanosine-3'-phosphate
  modified_base 10: mod_base = OTHER; note = 2'-O-methyladenosine-3'-phosphate
  modified_base 11: mod_base = OTHER; note = 2'-O-methylguanosine-3'-phosphate
  modified_base 12: mod_base = OTHER; note = 2'-O-methylguanosine-3'-phosphate
  modified_base 13: mod_base = OTHER; note = 2'-O-methyladenosine-3'-phosphate
  modified_base 14: mod_base = OTHER; note = 2'-deoxy-2'-fluorocytidine-3'-phosphate
  modified_base 15: mod_base = OTHER; note = 2'-O-methylcytidine-3'-phosphate
  modified_base 16: mod_base = OTHER; note = 2'-deoxy-2'-fluorouridine-3'-phosphate
  modified_base 17: mod_base = OTHER; note = 2'-O-methylguanosine-3'-phosphate
  modified_base 18: mod_base = OTHER; note = 2'-O-methylcytidine-3'-phosphate
  modified_base 19: mod_base = OTHER; note = 2'-O-methyladenosine-3'-phosphate
  modified_base 20: mod_base = OTHER; note = 2'-O-methylguanosine-3'-phosphate
  modified_base 21: mod_base = OTHER; note = 2'-O-methyladenosine-3'-phosphorothioate
  modified_base 22: mod_base = OTHER; note = 2'-O-methylguanosine-3'-phosphorothioate
  modified_base 23: mod_base = OTHER; note = 2'-O-methyluridine
  misc_feature 1..4: note = RNA
  misc_feature 6..23: note = RNA
  misc_feature 5: note = DNA
agatctgagaggacctgcagagt

SEQ ID NO: 1122 - DNA, 23 bp, synthetic construct
  source 1..23: mol_type = other DNA
  modified_base 1: mod_base = OTHER; note = 2'-O-methyladenosine-3'-phosphorothioate
  modified_base 2: mod_base = OTHER; note = 2'-deoxy-2'-fluoroadenosine-3'-phosphorothioate
  modified_base 3: mod_base = OTHER; note = 2'-O-methyladenosine-3'-phosphate
  modified_base 4: mod_base = OTHER; note = 2'-O-methylguanosine-3'-phosphate
  modified_base 6: mod_base = OTHER; note = 2'-O-methyluridine-3'-phosphate
  modified_base 7: mod_base = OTHER; note = cytidine-2'-phosphate
  modified_base 8: mod_base = OTHER; note = 2'-O-methyluridine-3'-phosphate
  modified_base 9: mod_base = OTHER; note = 2'-O-methylguanosine-3'-phosphate
  modified_base 10: mod_base = OTHER; note = 2'-O-methyladenosine-3'-phosphate
  modified_base 11: mod_base = OTHER; note = 2'-O-methylguanosine-3'-phosphate
  modified_base 12: mod_base = OTHER; note = 2'-O-methyladenosine-3'-phosphate
  modified_base 13: mod_base = OTHER; note = 2'-O-methylguanosine-3'-phosphate
  modified_base 14: mod_base = OTHER; note = 2'-deoxy-2'-fluoroguanosine-3'-phosphate
  modified_base 15: mod_base = OTHER; note = 2'-O-methyladenosine-3'-phosphate
  modified_base 16: mod_base = OTHER; note = 2'-deoxy-2'-fluorocytidine-3'-phosphate
  modified_base 17: mod_base = OTHER; note = 2'-O-methylcytidine-3'-phosphate
  modified_base 18: mod_base = OTHER; note = 2'-O-methyluridine-3'-phosphate
  modified_base 19: mod_base = OTHER; note = 2'-O-methylguanosine-3'-phosphate
  modified_base 20: mod_base = OTHER; note = 2'-O-methylcytidine-3'-phosphate
  modified_base 21: mod_base = OTHER; note = 2'-O-methyladenosine-3'-phosphorothioate
  modified_base 22: mod_base = OTHER; note = 2'-O-methylguanosine-3'-phosphorothioate
  modified_base 23: mod_base = OTHER; note = 2'-O-methyladenosine
  misc_feature 1..4: note = RNA
  misc_feature 6..23: note = RNA
  misc_feature 5: note = DNA
aaagatctgagaggacctgcaga

SEQ ID NO: 1123 - DNA, 23 bp, synthetic construct
  source 1..23: mol_type = other DNA
  modified_base 1: mod_base = OTHER; note = 2'-O-methyladenosine-3'-phosphorothioate
  modified_base 2: mod_base = OTHER; note = 2'-deoxy-2'-fluorouridine-3'-phosphorothioate
  modified_base 3: mod_base = OTHER; note = 2'-O-methylguanosine-3'-phosphate
  modified_base 4: mod_base = OTHER; note = 2'-O-methyladenosine-3'-phosphate
  modified_base 6: mod_base = OTHER; note = 2'-O-methylguanosine-3'-phosphate
  modified_base 7: mod_base = OTHER; note = guanosine-2'-phosphate
  modified_base 8: mod_base = OTHER; note = 2'-O-methyladenosine-3'-phosphate
  modified_base 9: mod_base = OTHER; note = 2'-O-methyluridine-3'-phosphate
  modified_base 10: mod_base = OTHER; note = 2'-O-methylguanosine-3'-phosphate
  modified_base 11: mod_base = OTHER; note = 2'-O-methylguanosine-3'-phosphate
  modified_base 12: mod_base = OTHER; note = 2'-O-methyladenosine-3'-phosphate
  modified_base 13: mod_base = OTHER; note = 2'-O-methyluridine-3'-phosphate
  modified_base 14: mod_base = OTHER; note = 2'-deoxy-2'-fluoroguanosine-3'-phosphate
  modified_base 15: mod_base = OTHER; note = 2'-O-methylguanosine-3'-phosphate
  modified_base 16: mod_base = OTHER; note = 2'-deoxy-2'-fluoroadenosine-3'-phosphate
  modified_base 17: mod_base = OTHER; note = 2'-O-methyladenosine-3'-phosphate
  modified_base 18: mod_base = OTHER; note = 2'-O-methylguanosine-3'-phosphate
  modified_base 19: mod_base = OTHER; note = 2'-O-methyladenosine-3'-phosphate
  modified_base 20: mod_base = OTHER; note = 2'-O-methyluridine-3'-phosphate
  modified_base 21: mod_base = OTHER; note = 2'-O-methylguanosine-3'-phosphorothioate
  modified_base 22: mod_base = OTHER; note = 2'-O-methylcytidine-3'-phosphorothioate
  modified_base 23: mod_base = OTHER; note = 2'-O-methylcytidine
  misc_feature 1..4: note = RNA
  misc_feature 6..23: note = RNA
  misc_feature 5: note = DNA
atgaaggatggatggaagatgcc

SEQ ID NO: 1124 - DNA, 23 bp, synthetic construct
  source 1..23: mol_type = other DNA
  modified_base 1: mod_base = OTHER; note = 2'-O-methyladenosine-3'-phosphorothioate
  modified_base 2: mod_base = OTHER; note = 2'-deoxy-2'-fluoroguanosine-3'-phosphorothioate
  modified_base 3: mod_base = OTHER; note = 2'-O-methyladenosine-3'-phosphate
  modified_base 4: mod_base = OTHER; note = 2'-O-methylguanosine-3'-phosphate
  modified_base 6: mod_base = OTHER; note = 2'-O-methyluridine-3'-phosphate
  modified_base 7: mod_base = OTHER; note = guanosine-2'-phosphate
  modified_base 8: mod_base = OTHER; note = 2'-O-methyladenosine-3'-phosphate
  modified_base 9: mod_base = OTHER; note = 2'-O-methylguanosine-3'-phosphate
  modified_base 10: mod_base = OTHER; note = 2'-O-methylcytidine-3'-phosphate
  modified_base 11: mod_base = OTHER; note = 2'-O-methyluridine-3'-phosphate
  modified_base 12: mod_base = OTHER; note = 2'-O-methylguanosine-3'-phosphate
  modified_base 13: mod_base = OTHER; note = 2'-O-methylguanosine-3'-phosphate
  modified_base 14: mod_base = OTHER; note = 2'-deoxy-2'-fluorouridine-3'-phosphate
  modified_base 15: mod_base = OTHER; note = 2'-O-methylguanosine-3'-phosphate
  modified_base 16: mod_base = OTHER; note = 2'-deoxy-2'-fluoroguanosine-3'-phosphate
  modified_base 17: mod_base = OTHER; note = 2'-O-methyladenosine-3'-phosphate
  modified_base 18: mod_base = OTHER; note = 2'-O-methylcytidine-3'-phosphate
  modified_base 19: mod_base = OTHER; note = 2'-O-methyladenosine-3'-phosphate
  modified_base 20: mod_base = OTHER; note = 2'-O-methyluridine-3'-phosphate
  modified_base 21: mod_base = OTHER; note = 2'-O-methyluridine-3'-phosphorothioate
  modified_base 22: mod_base = OTHER; note = 2'-O-methylguanosine-3'-phosphorothioate
  modified_base 23: mod_base = OTHER; note = 2'-O-methylguanosine
  misc_feature 1..4: note = RNA
  misc_feature 6..23: note = RNA
  misc_feature 5: note = DNA
agagatgagctggtggacattgg

SEQ ID NO: 1125 - DNA, 23 bp, synthetic construct
  source 1..23: mol_type = other DNA
  modified_base 1: mod_base = OTHER; note = 2'-O-methyladenosine-3'-phosphorothioate
  modified_base 2: mod_base = OTHER; note = 2'-deoxy-2'-fluoroguanosine-3'-phosphorothioate
  modified_base 3: mod_base = OTHER; note = 2'-O-methylguanosine-3'-phosphate
  modified_base 4: mod_base = OTHER; note = 2'-O-methyladenosine-3'-phosphate
  modified_base 6: mod_base = OTHER; note = 2'-O-methylguanosine-3'-phosphate
  modified_base 7: mod_base = OTHER; note = guanosine-2'-phosphate
  modified_base 8: mod_base = OTHER; note = 2'-O-methyladenosine-3'-phosphate
  modified_base 9: mod_base = OTHER; note = 2'-O-methyluridine-3'-phosphate
  modified_base 10: mod_base = OTHER; note = 2'-O-methyladenosine-3'-phosphate
  modified_base 11: mod_base = OTHER; note = 2'-O-methyladenosine-3'-phosphate
  modified_base 12: mod_base = OTHER; note = 2'-O-methylguanosine-3'-phosphate
  modified_base 13: mod_base = OTHER; note = 2'-O-methylguanosine-3'-phosphate
  modified_base 14: mod_base = OTHER; note = 2'-deoxy-2'-fluorocytidine-3'-phosphate
  modified_base 15: mod_base = OTHER; note = 2'-O-methylcytidine-3'-phosphate
  modified_base 16: mod_base = OTHER; note = 2'-deoxy-2'-fluoroadenosine-3'-phosphate
  modified_base 17: mod_base = OTHER; note = 2'-O-methylcytidine-3'-phosphate
  modified_base 18: mod_base = OTHER; note = 2'-O-methyluridine-3'-phosphate
  modified_base 19: mod_base = OTHER; note = 2'-O-methylguanosine-3'-phosphate
  modified_base 20: mod_base = OTHER; note = 2'-O-methyluridine-3'-phosphate
  modified_base 21: mod_base = OTHER; note = 2'-O-methyladenosine-3'-phosphorothioate
  modified_base 22: mod_base = OTHER; note = 2'-O-methylguanosine-3'-phosphorothioate
  modified_base 23: mod_base = OTHER; note = 2'-O-methyladenosine
  misc_feature 1..4: note = RNA
  misc_feature 6..23: note = RNA
  misc_feature 5: note = DNA
aggagggataaggccactgtaga

SEQ ID NO: 1126 - DNA, 23 bp, synthetic construct
  source 1..23: mol_type = other DNA
  modified_base 1: mod_base = OTHER; note = 2'-O-methyladenosine-3'-phosphorothioate
  modified_base 2: mod_base = OTHER; note = 2'-deoxy-2'-fluoroadenosine-3'-phosphorothioate
  modified_base 3: mod_base = OTHER; note = 2'-O-methyladenosine-3'-phosphate
  modified_base 4: mod_base = OTHER; note = 2'-O-methylguanosine-3'-phosphate
  modified_base 6: mod_base = OTHER; note = 2'-O-methyladenosine-3'-phosphate
  modified_base 7: mod_base = OTHER; note = guanosine-2'-phosphate
  modified_base 8: mod_base = OTHER; note = 2'-O-methylguanosine-3'-phosphate
  modified_base 9: mod_base = OTHER; note = 2'-O-methylguanosine-3'-phosphate
  modified_base 10: mod_base = OTHER; note = 2'-O-methyladenosine-3'-phosphate
  modified_base 11: mod_base = OTHER; note = 2'-O-methyluridine-3'-phosphate
  modified_base 12: mod_base = OTHER; note = 2'-O-methyladenosine-3'-phosphate
  modified_base 13: mod_base = OTHER; note = 2'-O-methyladenosine-3'-phosphate
  modified_base 14: mod_base = OTHER; note = 2'-deoxy-2'-fluoroguanosine-3'-phosphate
  modified_base 15: mod_base = OTHER; note = 2'-O-methylguanosine-3'-phosphate
  modified_base 16: mod_base = OTHER; note = 2'-deoxy-2'-fluorocytidine-3'-phosphate
  modified_base 17: mod_base = OTHER; note = 2'-O-methylcytidine-3'-phosphate
  modified_base 18: mod_base = OTHER; note = 2'-O-methyladenosine-3'-phosphate
  modified_base 19: mod_base = OTHER; note = 2'-O-methylcytidine-3'-phosphate
  modified_base 20: mod_base = OTHER; note = 2'-O-methyluridine-3'-phosphate
  modified_base 21: mod_base = OTHER; note = 2'-O-methylguanosine-3'-phosphorothioate
  modified_base 22: mod_base = OTHER; note = 2'-O-methyluridine-3'-phosphorothioate
  modified_base 23: mod_base = OTHER; note = 2'-O-methyladenosine
  misc_feature 1..4: note = RNA
  misc_feature 6..23: note = RNA
  misc_feature 5: note = DNA
aaaggagggataaggccactgta

SEQ ID NO: 1127 - DNA, 23 bp, synthetic construct
  source 1..23: mol_type = other DNA
  modified_base 1: mod_base = OTHER; note = 2'-O-methyladenosine-3'-phosphorothioate
  modified_base 2: mod_base = OTHER; note = 2'-deoxy-2'-fluoroguanosine-3'-phosphorothioate
  modified_base 3: mod_base = OTHER; note = 2'-O-methylguanosine-3'-phosphate
  modified_base 4: mod_base = OTHER; note = 2'-O-methyladenosine-3'-phosphate
  modified_base 6: mod_base = OTHER; note = 2'-O-methylguanosine-3'-phosphate
  modified_base 7: mod_base = OTHER; note = guanosine-2'-phosphate
  modified_base 8: mod_base = OTHER; note = 2'-O-methyladenosine-3'-phosphate
  modified_base 9: mod_base = OTHER; note = 2'-O-methylguanosine-3'-phosphate
  modified_base 10: mod_base = OTHER; note = 2'-O-methylguanosine-3'-phosphate
  modified_base 11: mod_base = OTHER; note = 2'-O-methylguanosine-3'-phosphate
  modified_base 12: mod_base = OTHER; note = 2'-O-methyladenosine-3'-phosphate
  modified_base 13: mod_base = OTHER; note = 2'-O-methyluridine-3'-phosphate
  modified_base 14: mod_base = OTHER; note = 2'-deoxy-2'-fluoroadenosine-3'-phosphate
  modified_base 15: mod_base = OTHER; note = 2'-O-methyladenosine-3'-phosphate
  modified_base 16: mod_base = OTHER; note = 2'-deoxy-2'-fluoroguanosine-3'-phosphate
  modified_base 17: mod_base = OTHER; note = 2'-O-methylguanosine-3'-phosphate
  modified_base 18: mod_base = OTHER; note = 2'-O-methylcytidine-3'-phosphate
  modified_base 19: mod_base = OTHER; note = 2'-O-methylcytidine-3'-phosphate
  modified_base 20: mod_base = OTHER; note = 2'-O-methyladenosine-3'-phosphate
  modified_base 21: mod_base = OTHER; note = 2'-O-methylcytidine-3'-phosphorothioate
  modified_base 22: mod_base = OTHER; note = 2'-O-methyluridine-3'-phosphorothioate
  modified_base 23: mod_base = OTHER; note = 2'-O-methylguanosine
  misc_feature 1..4: note = RNA
  misc_feature 6..23: note = RNA
  misc_feature 5: note = DNA
aggaaggagggataaggccactg

SEQ ID NO: 1128 - DNA, 23 bp, synthetic construct
  source 1..23: mol_type = other DNA
  modified_base 1: mod_base = OTHER; note = 2'-O-methyladenosine-3'-phosphorothioate
  modified_base 2: mod_base = OTHER; note = 2'-deoxy-2'-fluorocytidine-3'-phosphorothioate
  modified_base 3: mod_base = OTHER; note = 2'-O-methylguanosine-3'-phosphate
  modified_base 4: mod_base = OTHER; note = 2'-O-methylcytidine-3'-phosphate
  modified_base 6: mod_base = OTHER; note = 2'-O-methyluridine-3'-phosphate
  modified_base 7: mod_base = OTHER; note = cytidine-2'-phosphate
  modified_base 8: mod_base = OTHER; note = 2'-O-methyluridine-3'-phosphate
  modified_base 9: mod_base = OTHER; note = 2'-O-methylguanosine-3'-phosphate
  modified_base 10: mod_base = OTHER; note = 2'-O-methyladenosine-3'-phosphate
  modified_base 11: mod_base = OTHER; note = 2'-O-methyladenosine-3'-phosphate
  modified_base 12: mod_base = OTHER; note = 2'-O-methylguanosine-3'-phosphate
  modified_base 13: mod_base = OTHER; note = 2'-O-methylguanosine-3'-phosphate
  modified_base 14: mod_base = OTHER; note = 2'-deoxy-2'-fluoroadenosine-3'-phosphate
  modified_base 15: mod_base = OTHER; note = 2'-O-methyladenosine-3'-phosphate
  modified_base 16: mod_base = OTHER; note = 2'-deoxy-2'-fluoroguanosine-3'-phosphate
  modified_base 17: mod_base = OTHER; note = 2'-O-methylguanosine-3'-phosphate
  modified_base 18: mod_base = OTHER; note = 2'-O-methyladenosine-3'-phosphate
  modified_base 19: mod_base = OTHER; note = 2'-O-methylguanosine-3'-phosphate
  modified_base 20: mod_base = OTHER; note = 2'-O-methylguanosine-3'-phosphate
  modified_base 21: mod_base = OTHER; note = 2'-O-methylguanosine-3'-phosphorothioate
  modified_base 22: mod_base = OTHER; note = 2'-O-methyladenosine-3'-phosphorothioate
  modified_base 23: mod_base = OTHER; note = 2'-O-methyluridine
  misc_feature 1..4: note = RNA
  misc_feature 6..23: note = RNA
  misc_feature 5: note = DNA
acgcctctgaaggaaggagggat

SEQ ID NO: 1129 - DNA, 23 bp, synthetic construct
  source 1..23: mol_type = other DNA
  modified_base 1: mod_base = OTHER; note = 2'-O-methyladenosine-3'-phosphorothioate
  modified_base 2: mod_base = OTHER; note = 2'-deoxy-2'-fluoroguanosine-3'-phosphorothioate
  modified_base 3: mod_base = OTHER; note = 2'-O-methyladenosine-3'-phosphate
  modified_base 4: mod_base = OTHER; note = 2'-O-methyladenosine-3'-phosphate
  modified_base 6: mod_base = OTHER; note = 2'-O-methylguanosine-3'-phosphate
  modified_base 7: mod_base = OTHER; note = guanosine-2'-phosphate
  modified_base 8: mod_base = OTHER; note = 2'-O-methyluridine-3'-phosphate
  modified_base 9: mod_base = OTHER; note = 2'-O-methyladenosine-3'-phosphate
  modified_base 10: mod_base = OTHER; note = 2'-O-methylcytidine-3'-phosphate
  modified_base 11: mod_base = OTHER; note = 2'-O-methylguanosine-3'-phosphate
  modified_base 12: mod_base = OTHER; note = 2'-O-methyluridine-3'-phosphate
  modified_base 13: mod_base = OTHER; note = 2'-O-methyluridine-3'-phosphate
  modified_base 14: mod_base = OTHER; note = 2'-deoxy-2'-fluoroguanosine-3'-phosphate
  modified_base 15: mod_base = OTHER; note = 2'-O-methyluridine-3'-phosphate
  modified_base 16: mod_base = OTHER; note = 2'-deoxy-2'-fluorocytidine-3'-phosphate
  modified_base 17: mod_base = OTHER; note = 2'-O-methyladenosine-3'-phosphate
  modified_base 18: mod_base = OTHER; note = 2'-O-methylcytidine-3'-phosphate
  modified_base 19: mod_base = OTHER; note = 2'-O-methyluridine-3'-phosphate
  modified_base 20: mod_base = OTHER; note = 2'-O-methylcytidine-3'-phosphate
  modified_base 21: mod_base = OTHER; note = 2'-O-methyladenosine-3'-phosphorothioate
  modified_base 22: mod_base = OTHER; note = 2'-O-methylcytidine-3'-phosphorothioate
  modified_base 23: mod_base = OTHER; note = 2'-O-methyluridine
  misc_feature 1..4: note = RNA
  misc_feature 6..23: note = RNA
  misc_feature 5: note = DNA
agaagggtacgttgtcactcact

SEQ ID NO: 1130 - DNA, 23 bp, synthetic construct
  source 1..23: mol_type = other DNA
  modified_base 1: mod_base = OTHER; note = 2'-O-methyladenosine-3'-phosphorothioate
  modified_base 2: mod_base = OTHER; note = 2'-deoxy-2'-fluorouridine-3'-phosphorothioate
  modified_base 3: mod_base = OTHER; note = 2'-O-methylguanosine-3'-phosphate
  modified_base 4: mod_base = OTHER; note = 2'-O-methyladenosine-3'-phosphate
  modified_base 6: mod_base = OTHER; note = 2'-O-methylguanosine-3'-phosphate
  modified_base 7: mod_base = OTHER; note = guanosine-2'-phosphate
  modified_base 8: mod_base = OTHER; note = 2'-O-methylguanosine-3'-phosphate
  modified_base 9: mod_base = OTHER; note = 2'-O-methyluridine-3'-phosphate
  modified_base 10: mod_base = OTHER; note = 2'-O-methyladenosine-3'-phosphate
  modified_base 11: mod_base = OTHER; note = 2'-O-methylcytidine-3'-phosphate
  modified_base 12: mod_base = OTHER; note = 2'-O-methylguanosine-3'-phosphate
  modified_base 13: mod_base = OTHER; note = 2'-O-methyluridine-3'-phosphate
  modified_base 14: mod_base = OTHER; note = 2'-deoxy-2'-fluorouridine-3'-phosphate
  modified_base 15: mod_base = OTHER; note = 2'-O-methylguanosine-3'-phosphate
  modified_base 16: mod_base = OTHER; note = 2'-deoxy-2'-fluorouridine-3'-phosphate
  modified_base 17: mod_base = OTHER; note = 2'-O-methylcytidine-3'-phosphate
  modified_base 18: mod_base = OTHER; note = 2'-O-methyladenosine-3'-phosphate
  modified_base 19: mod_base = OTHER; note = 2'-O-methylcytidine-3'-phosphate
  modified_base 20: mod_base = OTHER; note = 2'-O-methyluridine-3'-phosphate
  modified_base 21: mod_base = OTHER; note = 2'-O-methylcytidine-3'-phosphorothioate
  modified_base 22: mod_base = OTHER; note = 2'-O-methyladenosine-3'-phosphorothioate
  modified_base 23: mod_base = OTHER; note = 2'-O-methylcytidine
  misc_feature 1..4: note = RNA
  misc_feature 6..23: note = RNA
  misc_feature 5: note = DNA
atgaagggtacgttgtcactcac

SEQ ID NO: 1131 - DNA, 23 bp, synthetic construct
  source 1..23: mol_type = other DNA
  modified_base 1: mod_base = OTHER; note = 2'-O-methyladenosine-3'-phosphorothioate
  modified_base 2: mod_base = OTHER; note = 2'-deoxy-2'-fluoroguanosine-3'-phosphorothioate
  modified_base 3: mod_base = OTHER; note = 2'-O-methylguanosine-3'-phosphate
  modified_base 4: mod_base = OTHER; note = 2'-O-methylcytidine-3'-phosphate
  modified_base 6: mod_base = OTHER; note = 2'-O-methyluridine-3'-phosphate
  modified_base 7: mod_base = OTHER; note = cytidine-2'-phosphate
  modified_base 8: mod_base = OTHER; note = 2'-O-methyladenosine-3'-phosphate
  modified_base 9: mod_base = OTHER; note = 2'-O-methyladenosine-3'-phosphate
  modified_base 10: mod_base = OTHER; note = 2'-O-methyluridine-3'-phosphate
  modified_base 11: mod_base = OTHER; note = 2'-O-methylguanosine-3'-phosphate
  modified_base 12: mod_base = OTHER; note = 2'-O-methyladenosine-3'-phosphate
  modified_base 13: mod_base = OTHER; note = 2'-O-methyladenosine-3'-phosphate
  modified_base 14: mod_base = OTHER; note = 2'-deoxy-2'-fluoroguanosine-3'-phosphate
  modified_base 15: mod_base = OTHER; note = 2'-O-methylguanosine-3'-phosphate
  modified_base 16: mod_base = OTHER; note = 2'-deoxy-2'-fluoroguanosine-3'-phosphate
  modified_base 17: mod_base = OTHER; note = 2'-O-methyluridine-3'-phosphate
  modified_base 18: mod_base = OTHER; note = 2'-O-methyladenosine-3'-phosphate
  modified_base 19: mod_base = OTHER; note = 2'-O-methylcytidine-3'-phosphate
  modified_base 20: mod_base = OTHER; note = 2'-O-methylguanosine-3'-phosphate
  modified_base 21: mod_base = OTHER; note = 2'-O-methyluridine-3'-phosphorothioate
  modified_base 22: mod_base = OTHER; note = 2'-O-methyluridine-3'-phosphorothioate
  modified_base 23: mod_base = OTHER; note = 2'-O-methylguanosine
  misc_feature 1..4: note = RNA
  misc_feature 6..23: note = RNA
  misc_feature 5: note = DNA
aggcatcaatgaagggtacgttg

SEQ ID NO: 1132 - DNA, 23 bp, synthetic construct
  source 1..23: mol_type = other DNA
  modified_base 1: mod_base = OTHER; note = 2'-O-methyladenosine-3'-phosphorothioate
  modified_base 2: mod_base = OTHER; note = 2'-deoxy-2'-fluorouridine-3'-phosphorothioate
  modified_base 3: mod_base = OTHER; note = 2'-O-methyluridine-3'-phosphate
  modified_base 4: mod_base = OTHER; note = 2'-O-methyluridine-3'-phosphate
  modified_base 6: mod_base = OTHER; note = 2'-O-methylguanosine-3'-phosphate
  modified_base 7: mod_base = OTHER; note = guanosine-2'-phosphate
  modified_base 8: mod_base = OTHER; note = 2'-O-methylguanosine-3'-phosphate
  modified_base 9: mod_base = OTHER; note = 2'-O-methylcytidine-3'-phosphate
  modified_base 10: mod_base = OTHER; note = 2'-O-methyladenosine-3'-phosphate
  modified_base 11: mod_base = OTHER; note = 2'-O-methylguanosine-3'-phosphate
  modified_base 12: mod_base = OTHER; note = 2'-O-methyladenosine-3'-phosphate
  modified_base 13: mod_base = OTHER; note = 2'-O-methyluridine-3'-phosphate
  modified_base 14: mod_base = OTHER; note = 2'-deoxy-2'-fluoroguanosine-3'-phosphate
  modified_base 15: mod_base = OTHER; note = 2'-O-methyluridine-3'-phosphate
  modified_base 16: mod_base = OTHER; note = 2'-deoxy-2'-fluorocytidine-3'-phosphate
  modified_base 17: mod_base = OTHER; note = 2'-O-methylguanosine-3'-phosphate
  modified_base 18: mod_base = OTHER; note = 2'-O-methyluridine-3'-phosphate
  modified_base 19: mod_base = OTHER; note = 2'-O-methyladenosine-3'-phosphate
  modified_base 20: mod_base = OTHER; note = 2'-O-methylcytidine-3'-phosphate
  modified_base 21: mod_base = OTHER; note = 2'-O-methyluridine-3'-phosphorothioate
  modified_base 22: mod_base = OTHER; note = 2'-O-methylcytidine-3'-phosphorothioate
  modified_base 23: mod_base = OTHER; note = 2'-O-methylcytidine
  misc_feature 1..4: note = RNA
  misc_feature 6..23: note = RNA
  misc_feature 5: note = DNA
atttagggcagatgtcgtactcc

SEQ ID NO: 1133 - DNA, 23 bp, synthetic construct
  source 1..23: mol_type = other DNA
  modified_base 1: mod_base = OTHER; note = 2'-O-methyladenosine-3'-phosphorothioate
  modified_base 2: mod_base = OTHER; note = 2'-deoxy-2'-fluoroguanosine-3'-phosphorothioate
  modified_base 3: mod_base = OTHER; note = 2'-O-methyladenosine-3'-phosphate
  modified_base 4: mod_base = OTHER; note = 2'-O-methylcytidine-3'-phosphate
  modified_base 6: mod_base = OTHER; note = 2'-O-methyluridine-3'-phosphate
  modified_base 7: mod_base = OTHER; note = guanosine-2'-phosphate
  modified_base 8: mod_base = OTHER; note = 2'-O-methyladenosine-3'-phosphate
  modified_base 9: mod_base = OTHER; note = 2'-O-methylcytidine-3'-phosphate
  modified_base 10: mod_base = OTHER; note = 2'-O-methyluridine-3'-phosphate
  modified_base 11: mod_base = OTHER; note = 2'-O-methyluridine-3'-phosphate
  modified_base 12: mod_base = OTHER; note = 2'-O-methyluridine-3'-phosphate
  modified_base 13: mod_base = OTHER; note = 2'-O-methyladenosine-3'-phosphate
  modified_base 14: mod_base = OTHER; note = 2'-deoxy-2'-fluoroguanosine-3'-phosphate
  modified_base 15: mod_base = OTHER; note = 2'-O-methylguanosine-3'-phosphate
  modified_base 16: mod_base = OTHER; note = 2'-deoxy-2'-fluoroguanosine-3'-phosphate
  modified_base 17: mod_base = OTHER; note = 2'-O-methylcytidine-3'-phosphate
  modified_base 18: mod_base = OTHER; note = 2'-O-methyladenosine-3'-phosphate
  modified_base 19: mod_base = OTHER; note = 2'-O-methylguanosine-3'-phosphate
  modified_base 20: mod_base = OTHER; note = 2'-O-methyladenosine-3'-phosphate
  modified_base 21: mod_base = OTHER; note = 2'-O-methyluridine-3'-phosphorothioate
  modified_base 22: mod_base = OTHER; note = 2'-O-methylguanosine-3'-phosphorothioate
  modified_base 23: mod_base = OTHER; note = 2'-O-methyluridine
  misc_feature 1..4: note = RNA
  misc_feature 6..23: note = RNA
  misc_feature 5: note = DNA
agacttgactttagggcagatgt

SEQ ID NO: 1134 - DNA, 23 bp, synthetic construct
  source 1..23: mol_type = other DNA
  modified_base 1: mod_base = OTHER; note = 2'-O-methyladenosine-3'-phosphorothioate
  modified_base 2: mod_base = OTHER; note = 2'-deoxy-2'-fluorouridine-3'-phosphorothioate
  modified_base 3: mod_base = OTHER; note = 2'-O-methyladenosine-3'-phosphate
  modified_base 4: mod_base = OTHER; note = 2'-O-methylguanosine-3'-phosphate
  modified_base 6: mod_base = OTHER; note = 2'-O-methylguanosine-3'-phosphate
  modified_base 7: mod_base = OTHER; note = guanosine-2'-phosphate
  modified_base 8: mod_base = OTHER; note = 2'-O-methyluridine-3'-phosphate
  modified_base 9: mod_base = OTHER; note = 2'-O-methyluridine-3'-phosphate
  modified_base 10: mod_base = OTHER; note = 2'-O-methylcytidine-3'-phosphate
  modified_base 11: mod_base = OTHER; note = 2'-O-methylcytidine-3'-phosphate
  modified_base 12: mod_base = OTHER; note = 2'-O-methylcytidine-3'-phosphate
  modified_base 13: mod_base = OTHER; note = 2'-O-methyluridine-3'-phosphate
  modified_base 14: mod_base = OTHER; note = 2'-deoxy-2'-fluoroguanosine-3'-phosphate
  modified_base 15: mod_base = OTHER; note = 2'-O-methyluridine-3'-phosphate
  modified_base 16: mod_base = OTHER; note = 2'-deoxy-2'-fluoroguanosine-3'-phosphate
  modified_base 17: mod_base = OTHER; note = 2'-O-methylcytidine-3'-phosphate
  modified_base 18: mod_base = OTHER; note = 2'-O-methyladenosine-3'-phosphate
  modified_base 19: mod_base = OTHER; note = 2'-O-methylguanosine-3'-phosphate
  modified_base 20: mod_base = OTHER; note = 2'-O-methyladenosine-3'-phosphate
  modified_base 21: mod_base = OTHER; note = 2'-O-methylguanosine-3'-phosphorothioate
  modified_base 22: mod_base = OTHER; note = 2'-O-methylguanosine-3'-phosphorothioate
  modified_base 23: mod_base = OTHER; note = 2'-O-methylcytidine
  misc_feature 1..4: note = RNA
  misc_feature 6..23: note = RNA
  misc_feature 5: note = DNA
atagaggttccctgtgcagaggc

SEQ ID NO: 1135 - DNA, 23 bp, synthetic construct
  source 1..23: mol_type = other DNA
  modified_base 1: mod_base = OTHER; note = 2'-O-methyladenosine-3'-phosphorothioate
  modified_base 2: mod_base = OTHER; note = 2'-deoxy-2'-fluoroguanosine-3'-phosphorothioate
  modified_base 3: mod_base = OTHER; note = 2'-O-methyluridine-3'-phosphate
  modified_base 4: mod_base = OTHER; note = 2'-O-methyladenosine-3'-phosphate
  modified_base 6: mod_base = OTHER; note = 2'-O-methyladenosine-3'-phosphate
  modified_base 7: mod_base = OTHER; note = guanosine-2'-phosphate
  modified_base 8: mod_base = OTHER; note = 2'-O-methylguanosine-3'-phosphate
  modified_base 9: mod_base = OTHER; note = 2'-O-methyluridine-3'-phosphate
  modified_base 10: mod_base = OTHER; note = 2'-O-methyluridine-3'-phosphate
  modified_base 11: mod_base = OTHER; note = 2'-O-methylcytidine-3'-phosphate
  modified_base 12: mod_base = OTHER; note = 2'-O-methylcytidine-3'-phosphate
  modified_base 13: mod_base = OTHER; note = 2'-O-methylcytidine-3'-phosphate
  modified_base 14: mod_base = OTHER; note = 2'-deoxy-2'-fluorouridine-3'-phosphate
  modified_base 15: mod_base = OTHER; note = 2'-O-methylguanosine-3'-phosphate
  modified_base 16: mod_base = OTHER; note = 2'-deoxy-2'-fluorouridine-3'-phosphate
  modified_base 17: mod_base = OTHER; note = 2'-O-methylguanosine-3'-phosphate
  modified_base 18: mod_base = OTHER; note = 2'-O-methylcytidine-3'-phosphate
  modified_base 19: mod_base = OTHER; note = 2'-O-methyladenosine-3'-phosphate
  modified_base 20: mod_base = OTHER; note = 2'-O-methylguanosine-3'-phosphate
  modified_base 21: mod_base = OTHER; note = 2'-O-methyladenosine-3'-phosphorothioate
  modified_base 22: mod_base = OTHER; note = 2'-O-methylguanosine-3'-phosphorothioate
  modified_base 23: mod_base = OTHER; note = 2'-O-methylguanosine
  misc_feature 1..4: note = RNA
  misc_feature 6..23: note = RNA
  misc_feature 5: note = DNA
agtagaggttccctgtgcagagg

SEQ ID NO: 1136 - DNA, 23 bp, synthetic construct
  source 1..23: mol_type = other DNA
  modified_base 1: mod_base = OTHER; note = 2'-O-methyladenosine-3'-phosphorothioate
  modified_base 2: mod_base = OTHER; note = 2'-deoxy-2'-fluoroadenosine-3'-phosphorothioate
  modified_base 3: mod_base = OTHER; note = 2'-O-methylguanosine-3'-phosphate
  modified_base 4: mod_base = OTHER; note = 2'-O-methyladenosine-3'-phosphate
  modified_base 6: mod_base = OTHER; note = 2'-O-methylguanosine-3'-phosphate
  modified_base 7: mod_base = OTHER; note = guanosine-2'-phosphate
  modified_base 8: mod_base = OTHER; note = 2'-O-methyluridine-3'-phosphate
  modified_base 9: mod_base = OTHER; note = 2'-O-methyladenosine-3'-phosphate
  modified_base 10: mod_base = OTHER; note = 2'-O-methylguanosine-3'-phosphate
  modified_base 11: mod_base = OTHER; note = 2'-O-methyladenosine-3'-phosphate
  modified_base 12: mod_base = OTHER; note = 2'-O-methylguanosine-3'-phosphate
  modified_base 13: mod_base = OTHER; note = 2'-O-methylguanosine-3'-phosphate
  modified_base 14: mod_base = OTHER; note = 2'-deoxy-2'-fluorouridine-3'-phosphate
  modified_base 15: mod_base = OTHER; note = 2'-O-methyluridine-3'-phosphate
  modified_base 16: mod_base = OTHER; note = 2'-deoxy-2'-fluorocytidine-3'-phosphate
  modified_base 17: mod_base = OTHER; note = 2'-O-methylcytidine-3'-phosphate
  modified_base 18: mod_base = OTHER; note = 2'-O-methylcytidine-3'-phosphate
  modified_base 19: mod_base = OTHER; note = 2'-O-methyluridine-3'-phosphate
  modified_base 20: mod_base = OTHER; note = 2'-O-methylguanosine-3'-phosphate
  modified_base 21: mod_base = OTHER; note = 2'-O-methyluridine-3'-phosphorothioate
  modified_base 22: mod_base = OTHER; note = 2'-O-methylguanosine-3'-phosphorothioate
  modified_base 23: mod_base = OTHER; note = 2'-O-methylcytidine
  misc_feature 1..4: note = RNA
  misc_feature 6..23: note = RNA
  misc_feature 5: note = DNA
aagaaggtagaggttccctgtgc

SEQ ID NO: 1137 - DNA, 23 bp, synthetic construct
  source 1..23: mol_type = other DNA
  modified_base 1: mod_base = OTHER; note = 2'-O-methyladenosine-3'-phosphorothioate
  modified_base 2: mod_base = OTHER; note = 2'-deoxy-2'-fluorocytidine-3'-phosphorothioate
  modified_base 3: mod_base = OTHER; note = 2'-O-methylguanosine-3'-phosphate
  modified_base 4: mod_base = OTHER; note = 2'-O-methyladenosine-3'-phosphate
  modified_base 6: mod_base = OTHER; note = 2'-O-methylguanosine-3'-phosphate
  modified_base 7: mod_base = OTHER; note = guanosine-2'-phosphate
  modified_base 8: mod_base = OTHER; note = 2'-O-methylcytidine-3'-phosphate
  modified_base 9: mod_base = OTHER; note = 2'-O-methyladenosine-3'-phosphate
  modified_base 10: mod_base = OTHER; note = 2'-O-methyluridine-3'-phosphate
  modified_base 11: mod_base = OTHER; note = 2'-O-methyladenosine-3'-phosphate
  modified_base 12: mod_base = OTHER; note = 2'-O-methyluridine-3'-phosphate
  modified_base 13: mod_base = OTHER; note = 2'-O-methylcytidine-3'-phosphate
  modified_base 14: mod_base = OTHER; note = 2'-deoxy-2'-fluorouridine-3'-phosphate
  modified_base 15: mod_base = OTHER; note = 2'-O-methylcytidine-3'-phosphate
  modified_base 16: mod_base = OTHER; note = 2'-deoxy-2'-fluorouridine-3'-phosphate
  modified_base 17: mod_base = OTHER; note = 2'-O-methylcytidine-3'-phosphate
  modified_base 18: mod_base = OTHER; note = 2'-O-methylcytidine-3'-phosphate
  modified_base 19: mod_base = OTHER; note = 2'-O-methylcytidine-3'-phosphate
  modified_base 20: mod_base = OTHER; note = 2'-O-methyladenosine-3'-phosphate
  modified_base 21: mod_base = OTHER; note = 2'-O-methylguanosine-3'-phosphorothioate
  modified_base 22: mod_base = OTHER; note = 2'-O-methylcytidine-3'-phosphorothioate
  modified_base 23: mod_base = OTHER; note = 2'-O-methyladenosine
  misc_feature 1..4: note = RNA
  misc_feature 6..23: note = RNA
  misc_feature 5: note = DNA
acgaaggcatatctctcccagca

SEQ ID NO: 1138 - DNA, 23 bp, synthetic construct
  source 1..23: mol_type = other DNA
  modified_base 1: mod_base = OTHER; note = 2'-O-methyladenosine-3'-phosphorothioate
  modified_base 2: mod_base = OTHER; note = 2'-deoxy-2'-fluorouridine-3'-phosphorothioate
  modified_base 3: mod_base = OTHER; note = 2'-O-methylcytidine-3'-phosphate
  modified_base 4: mod_base = OTHER; note = 2'-O-methylguanosine-3'-phosphate
  modified_base 6: mod_base = OTHER; note = 2'-O-methyladenosine-3'-phosphate
  modified_base 7: mod_base = OTHER; note = guanosine-2'-phosphate
  modified_base 8: mod_base = OTHER; note = 2'-O-methylguanosine-3'-phosphate
  modified_base 9: mod_base = OTHER; note = 2'-O-methylcytidine-3'-phosphate
  modified_base 10: mod_base = OTHER; note = 2'-O-methyladenosine-3'-phosphate
  modified_base 11: mod_base = OTHER; note = 2'-O-methyluridine-3'-phosphate
  modified_base 12: mod_base = OTHER; note = 2'-O-methyladenosine-3'-phosphate
  modified_base 13: mod_base = OTHER; note = 2'-O-methyluridine-3'-phosphate
  modified_base 14: mod_base = OTHER; note = 2'-deoxy-2'-fluorocytidine-3'-phosphate
  modified_base 15: mod_base = OTHER; note = 2'-O-methyluridine-3'-phosphate
  modified_base 16: mod_base = OTHER; note = 2'-deoxy-2'-fluorocytidine-3'-phosphate
  modified_base 17: mod_base = OTHER; note = 2'-O-methyluridine-3'-phosphate
  modified_base 18: mod_base = OTHER; note = 2'-O-methylcytidine-3'-phosphate
  modified_base 19: mod_base = OTHER; note = 2'-O-methylcytidine-3'-phosphate
  modified_base 20: mod_base = OTHER; note = 2'-O-methylcytidine-3'-phosphate
  modified_base 21: mod_base = OTHER; note = 2'-O-methyladenosine-3'-phosphorothioate
  modified_base 22: mod_base = OTHER; note = 2'-O-methylguanosine-3'-phosphorothioate
  modified_base 23: mod_base = OTHER; note = 2'-O-methylcytidine
  misc_feature 1..4: note = RNA
  misc_feature 6..23: note = RNA
  misc_feature 5: note = DNA
atcgaaggcatatctctcccagc

SEQ ID NO: 1139 - DNA, 23 bp, synthetic construct
  source 1..23: mol_type = other DNA
  modified_base 1: mod_base = OTHER; note = 2'-O-methyladenosine-3'-phosphorothioate
  modified_base 2: mod_base = OTHER; note = 2'-deoxy-2'-fluoroadenosine-3'-phosphorothioate
  modified_base 3: mod_base = OTHER; note = 2'-O-methyluridine-3'-phosphate
  modified_base 4: mod_base = OTHER; note = 2'-O-methylcytidine-3'-phosphate
  modified_base 6: mod_base = OTHER; note = 2'-O-methyluridine-3'-phosphate
  modified_base 7: mod_base = OTHER; note = cytidine-2'-phosphate
  modified_base 8: mod_base = OTHER; note = 2'-O-methylguanosine-3'-phosphate
  modified_base 9: mod_base = OTHER; note = 2'-O-methyladenosine-3'-phosphate
  modified_base 10: mod_base = OTHER; note = 2'-O-methyladenosine-3'-phosphate
  modified_base 11: mod_base = OTHER; note = 2'-O-methylguanosine-3'-phosphate
  modified_base 12: mod_base = OTHER; note = 2'-O-methylguanosine-3'-phosphate
  modified_base 13: mod_base = OTHER; note = 2'-O-methylcytidine-3'-phosphate
  modified_base 14: mod_base = OTHER; note = 2'-deoxy-2'-fluoroadenosine-3'-phosphate
  modified_base 15: mod_base = OTHER; note = 2'-O-methyluridine-3'-phosphate
  modified_base 16: mod_base = OTHER; note = 2'-deoxy-2'-fluoroadenosine-3'-phosphate
  modified_base 17: mod_base = OTHER; note = 2'-O-methyluridine-3'-phosphate
  modified_base 18: mod_base = OTHER; note = 2'-O-methylcytidine-3'-phosphate
  modified_base 19: mod_base = OTHER; note = 2'-O-methyluridine-3'-phosphate
  modified_base 20: mod_base = OTHER; note = 2'-O-methylcytidine-3'-phosphate
  modified_base 21: mod_base = OTHER; note = 2'-O-methyluridine-3'-phosphorothioate
  modified_base 22: mod_base = OTHER; note = 2'-O-methylcytidine-3'-phosphorothioate
  modified_base 23: mod_base = OTHER; note = 2'-O-methylcytidine
  misc_feature 1..4: note = RNA
  misc_feature 6..23: note = RNA
  misc_feature 5: note = DNA
aatcctcgaaggcatatctctcc

SEQ ID NO: 1140 - DNA, 23 bp, synthetic construct
  source 1..23: mol_type = other DNA
  modified_base 1: mod_base = OTHER; note = 2'-O-methyladenosine-3'-phosphorothioate
  modified_base 2: mod_base = OTHER; note = 2'-deoxy-2'-fluoroadenosine-3'-phosphorothioate
  modified_base 3: mod_base = OTHER; note = 2'-O-methyluridine-3'-phosphate
  modified_base 4: mod_base = OTHER; note = 2'-O-methyladenosine-3'-phosphate
  modified_base 6: mod_base = OTHER; note = 2'-O-methylcytidine-3'-phosphate
  modified_base 7: mod_base = OTHER; note = cytidine-2'-phosphate
  modified_base 8: mod_base = OTHER; note = 2'-O-methyluridine-3'-phosphate
  modified_base 9: mod_base = OTHER; note = 2'-O-methylcytidine-3'-phosphate
  modified_base 10: mod_base = OTHER; note = 2'-O-methylguanosine-3'-phosphate
  modified_base 11: mod_base = OTHER; note = 2'-O-methyladenosine-3'-phosphate
  modified_base 12: mod_base = OTHER; note = 2'-O-methyladenosine-3'-phosphate
  modified_base 13: mod_base = OTHER; note = 2'-O-methylguanosine-3'-phosphate
  modified_base 14: mod_base = OTHER; note = 2'-deoxy-2'-fluoroguanosine-3'-phosphate
  modified_base 15: mod_base = OTHER; note = 2'-O-methylcytidine-3'-phosphate
  modified_base 16: mod_base = OTHER; note = 2'-deoxy-2'-fluoroadenosine-3'-phosphate
  modified_base 17: mod_base = OTHER; note = 2'-O-methyluridine-3'-phosphate
  modified_base 18: mod_base = OTHER; note = 2'-O-methyladenosine-3'-phosphate
  modified_base 19: mod_base = OTHER; note = 2'-O-methyluridine-3'-phosphate
  modified_base 20: mod_base = OTHER; note = 2'-O-methylcytidine-3'-phosphate
  modified_base 21: mod_base = OTHER; note = 2'-O-methyluridine-3'-phosphorothioate
  modified_base 22: mod_base = OTHER; note = 2'-O-methylcytidine-3'-phosphorothioate
  modified_base 23: mod_base = OTHER; note = 2'-O-methyluridine
  misc_feature 1..4: note = RNA
  misc_feature 6..23: note = RNA
  misc_feature 5: note = DNA
aatatcctcgaaggcatatctct

SEQ ID NO: 1141 - DNA, 23 bp, synthetic construct
  source 1..23: mol_type = other DNA
  modified_base 1: mod_base = OTHER; note = 2'-O-methyladenosine-3'-phosphorothioate
  modified_base 2: mod_base = OTHER; note = 2'-deoxy-2'-fluoroadenosine-3'-phosphorothioate
  modified_base 3: mod_base = OTHER; note = 2'-O-methyladenosine-3'-phosphate
  modified_base 4: mod_base = OTHER; note = 2'-O-methyluridine-3'-phosphate
  modified_base 6: mod_base = OTHER; note = 2'-O-methyluridine-3'-phosphate
  modified_base 7: mod_base = OTHER; note = cytidine-2'-phosphate
  modified_base 8: mod_base = OTHER; note = 2'-O-methylcytidine-3'-phosphate
  modified_base 9: mod_base = OTHER; note = 2'-O-methyluridine-3'-phosphate
  modified_base 10: mod_base = OTHER; note = 2'-O-methylcytidine-3'-phosphate
  modified_base 11: mod_base = OTHER; note = 2'-O-methylguanosine-3'-phosphate
  modified_base 12: mod_base = OTHER; note = 2'-O-methyladenosine-3'-phosphate
  modified_base 13: mod_base = OTHER; note = 2'-O-methyladenosine-3'-phosphate
  modified_base 14: mod_base = OTHER; note = 2'-deoxy-2'-fluoroguanosine-3'-phosphate
  modified_base 15: mod_base = OTHER; note = 2'-O-methylguanosine-3'-phosphate
  modified_base 16: mod_base = OTHER; note = 2'-deoxy-2'-fluorocytidine-3'-phosphate
  modified_base 17: mod_base = OTHER; note = 2'-O-methyladenosine-3'-phosphate
  modified_base 18: mod_base = OTHER; note = 2'-O-methyluridine-3'-phosphate
  modified_base 19: mod_base = OTHER; note = 2'-O-methyladenosine-3'-phosphate
  modified_base 20: mod_base = OTHER; note = 2'-O-methyluridine-3'-phosphate
  modified_base 21: mod_base = OTHER; note = 2'-O-methylcytidine-3'-phosphorothioate
  modified_base 22: mod_base = OTHER; note = 2'-O-methyluridine-3'-phosphorothioate
  modified_base 23: mod_base = OTHER; note = 2'-O-methylcytidine
  misc_feature 1..4: note = RNA
  misc_feature 6..23: note = RNA
  misc_feature 5: note = DNA
aaatatcctcgaaggcatatctc

SEQ ID NO: 1142 - DNA, 23 bp, synthetic construct
  source 1..23: mol_type = other DNA
  modified_base 1: mod_base = OTHER; note = 2'-O-methyladenosine-3'-phosphorothioate
  modified_base 2: mod_base = OTHER; note = 2'-deoxy-2'-fluorouridine-3'-phosphorothioate
  modified_base 3: mod_base = OTHER; note = 2'-O-methyluridine-3'-phosphate
  modified_base 4: mod_base = OTHER; note = 2'-O-methylguanosine-3'-phosphate
  modified_base 6: mod_base = OTHER; note = 2'-O-methyladenosine-3'-phosphate
  modified_base 7: mod_base = OTHER; note = guanosine-2'-phosphate
  modified_base 8: mod_base = OTHER; note = 2'-O-methyladenosine-3'-phosphate
  modified_base 9: mod_base = OTHER; note = 2'-O-methyluridine-3'-phosphate
  modified_base 10: mod_base = OTHER; note = 2'-O-methylguanosine-3'-phosphate
  modified_base 11: mod_base = OTHER; note = 2'-O-methylcytidine-3'-phosphate
  modified_base 12: mod_base = OTHER; note = 2'-O-methylcytidine-3'-phosphate
  modified_base 13: mod_base = OTHER; note = 2'-O-methylcytidine-3'-phosphate
  modified_base 14: mod_base = OTHER; note = 2'-deoxy-2'-fluorouridine-3'-phosphate
  modified_base 15: mod_base = OTHER; note = 2'-O-methyluridine-3'-phosphate
  modified_base 16: mod_base = OTHER; note = 2'-deoxy-2'-fluorocytidine-3'-phosphate
  modified_base 17: mod_base = OTHER; note = 2'-O-methyluridine-3'-phosphate
  modified_base 18: mod_base = OTHER; note = 2'-O-methylcytidine-3'-phosphate
  modified_base 19: mod_base = OTHER; note = 2'-O-methyluridine-3'-phosphate
  modified_base 20: mod_base = OTHER; note = 2'-O-methyluridine-3'-phosphate
  modified_base 21: mod_base = OTHER; note = 2'-O-methylcytidine-3'-phosphorothioate
  modified_base 22: mod_base = OTHER; note = 2'-O-methylcytidine-3'-phosphorothioate
  modified_base 23: mod_base = OTHER; note = 2'-O-methyladenosine
  misc_feature 1..4: note = RNA
  misc_feature 6..23: note = RNA
  misc_feature 5: note = DNA
attgcagatgcccttctcttcca

SEQ ID NO: 1143 - DNA, 23 bp, synthetic construct
  source 1..23: mol_type = other DNA
  modified_base 1: mod_base = OTHER; note = 2'-O-methyladenosine-3'-phosphorothioate
  modified_base 2: mod_base = OTHER; note = 2'-deoxy-2'-fluorocytidine-3'-phosphorothioate
  modified_base 3: mod_base = OTHER; note = 2'-O-methylguanosine-3'-phosphate
  modified_base 4: mod_base = OTHER; note = 2'-O-methylcytidine-3'-phosphate
  modified_base 6: mod_base = OTHER; note = 2'-O-methylguanosine-3'-phosphate
  modified_base 7: mod_base = OTHER; note = guanosine-2'-phosphate
  modified_base 8: mod_base = OTHER; note = 2'-O-methyluridine-3'-phosphate
  modified_base 9: mod_base = OTHER; note = 2'-O-methylguanosine-3'-phosphate
  modified_base 10: mod_base = OTHER; note = 2'-O-methylguanosine-3'-phosphate
  modified_base 11: mod_base = OTHER; note = 2'-O-methyluridine-3'-phosphate
  modified_base 12: mod_base = OTHER; note = 2'-O-methylcytidine-3'-phosphate
  modified_base 13: mod_base = OTHER; note = 2'-O-methyluridine-3'-phosphate
  modified_base 14: mod_base = OTHER; note = 2'-deoxy-2'-fluoroadenosine-3'-phosphate
  modified_base 15: mod_base = OTHER; note = 2'-O-methylguanosine-3'-phosphate
  modified_base 16: mod_base = OTHER; note = 2'-deoxy-2'-fluorocytidine-3'-phosphate
  modified_base 17: mod_base = OTHER; note = 2'-O-methyladenosine-3'-phosphate
  modified_base 18: mod_base = OTHER; note = 2'-O-methylguanosine-3'-phosphate
  modified_base 19: mod_base = OTHER; note = 2'-O-methylcytidine-3'-phosphate
  modified_base 20: mod_base = OTHER; note = 2'-O-methyluridine-3'-phosphate
  modified_base 21: mod_base = OTHER; note = 2'-O-methylcytidine-3'-phosphorothioate
  modified_base 22: mod_base = OTHER; note = 2'-O-methyladenosine-3'-phosphorothioate
  modified_base 23: mod_base = OTHER; note = 2'-O-methyluridine
  misc_feature 1..4: note = RNA
  misc_feature 6..23: note = RNA
  misc_feature 5: note = DNA
acgcaggtggtctagcagctcat

SEQ ID NO: 1144 - DNA, 23 bp, synthetic construct
  source 1..23: mol_type = other DNA
  modified_base 1: mod_base = OTHER; note = 2'-O-methyladenosine-3'-phosphorothioate
  modified_base 2: mod_base = OTHER; note = 2'-deoxy-2'-fluoroadenosine-3'-phosphorothioate
  modified_base 3: mod_base = OTHER; note = 2'-O-methyluridine-3'-phosphate
  modified_base 4: mod_base = OTHER; note = 2'-O-methylguanosine-3'-phosphate
  modified_base 6: mod_base = OTHER; note = 2'-O-methyluridine-3'-phosphate
  modified_base 7: mod_base = OTHER; note = guanosine-2'-phosphate
  modified_base 8: mod_base = OTHER; note = 2'-O-methyladenosine-3'-phosphate
  modified_base 9: mod_base = OTHER; note = 2'-O-methylguanosine-3'-phosphate
  modified_base 10: mod_base = OTHER; note = 2'-O-methyladenosine-3'-phosphate
  modified_base 11: mod_base = OTHER; note = 2'-O-methylcytidine-3'-phosphate
  modified_base 12: mod_base = OTHER; note = 2'-O-methylguanosine-3'-phosphate
  modified_base 13: mod_base = OTHER; note = 2'-O-methylcytidine-3'-phosphate
  modified_base 14: mod_base = OTHER; note = 2'-deoxy-2'-fluoroadenosine-3'-phosphate
  modified_base 15: mod_base = OTHER; note = 2'-O-methylguanosine-3'-phosphate
  modified_base 16: mod_base = OTHER; note = 2'-deoxy-2'-fluoroguanosine-3'-phosphate
  modified_base 17: mod_base = OTHER; note = 2'-O-methyluridine-3'-phosphate
  modified_base 18: mod_base = OTHER; note = 2'-O-methylguanosine-3'-phosphate
  modified_base 19: mod_base = OTHER; note = 2'-O-methylguanosine-3'-phosphate
  modified_base 20: mod_base = OTHER; note = 2'-O-methyluridine-3'-phosphate
  modified_base 21: mod_base = OTHER; note = 2'-O-methylcytidine-3'-phosphorothioate
  modified_base 22: mod_base = OTHER; note = 2'-O-methyluridine-3'-phosphorothioate
  modified_base 23: mod_base = OTHER; note = 2'-O-methyladenosine
  misc_feature 1..4: note = RNA
  misc_feature 6..23: note = RNA
  misc_feature 5: note = DNA
aatgctgagacgcaggtggtcta

SEQ ID NO: 1145 - DNA, 23 bp, synthetic construct
  source 1..23: mol_type = other DNA
  modified_base 1: mod_base = OTHER; note = 2'-O-methyladenosine-3'-phosphorothioate
  modified_base 2: mod_base = OTHER; note = 2'-deoxy-2'-fluoroadenosine-3'-phosphorothioate
  modified_base 3: mod_base = OTHER; note = 2'-O-methylguanosine-3'-phosphate
  modified_base 4: mod_base = OTHER; note = 2'-O-methylguanosine-3'-phosphate
  modified_base 6: mod_base = OTHER; note = 2'-O-methyluridine-3'-phosphate
  modified_base 7: mod_base = OTHER; note = guanosine-2'-phosphate
  modified_base 8: mod_base = OTHER; note = 2'-O-methylcytidine-3'-phosphate
  modified_base 9: mod_base = OTHER; note = 2'-O-methyluridine-3'-phosphate
  modified_base 10: mod_base = OTHER; note = 2'-O-methylguanosine-3'-phosphate
  modified_base 11: mod_base = OTHER; note = 2'-O-methyladenosine-3'-phosphate
  modified_base 12: mod_base = OTHER; note = 2'-O-methylguanosine-3'-phosphate
  modified_base 13: mod_base = OTHER; note = 2'-O-methyladenosine-3'-phosphate
  modified_base 14: mod_base = OTHER; note = 2'-deoxy-2'-fluorocytidine-3'-phosphate
  modified_base 15: mod_base = OTHER; note = 2'-O-methylguanosine-3'-phosphate
  modified_base 16: mod_base = OTHER; note = 2'-deoxy-2'-fluorocytidine-3'-phosphate
  modified_base 17: mod_base = OTHER; note = 2'-O-methyladenosine-3'-phosphate
  modified_base 18: mod_base = OTHER; note = 2'-O-methylguanosine-3'-phosphate
  modified_base 19: mod_base = OTHER; note = 2'-O-methylguanosine-3'-phosphate
  modified_base 20: mod_base = OTHER; note = 2'-O-methyluridine-3'-phosphate
  modified_base 21: mod_base = OTHER; note = 2'-O-methylguanosine-3'-phosphorothioate
  modified_base 22: mod_base = OTHER; note = 2'-O-methylguanosine-3'-phosphorothioate
  modified_base 23: mod_base = OTHER; note = 2'-O-methyluridine
  misc_feature 1..4: note = RNA
  misc_feature 6..23: note = RNA
  misc_feature 5: note = DNA
aaggatgctgagacgcaggtggt

SEQ ID NO: 1146 - DNA, 23 bp, synthetic construct
  source 1..23: mol_type = other DNA
  modified_base 1: mod_base = OTHER; note = 2'-O-methyladenosine-3'-phosphorothioate
  modified_base 2: mod_base = OTHER; note = 2'-deoxy-2'-fluoroadenosine-3'-phosphorothioate
  modified_base 3: mod_base = OTHER; note = 2'-O-methylguanosine-3'-phosphate
  modified_base 4: mod_base = OTHER; note = 2'-O-methylguanosine-3'-phosphate
  modified_base 6: mod_base = OTHER; note = 2'-O-methyluridine-3'-phosphate
  modified_base 7: mod_base = OTHER; note = guanosine-2'-phosphate
  modified_base 8: mod_base = OTHER; note = 2'-O-methylcytidine-3'-phosphate
  modified_base 9: mod_base = OTHER; note = 2'-O-methyluridine-3'-phosphate
  modified_base 10: mod_base = OTHER; note = 2'-O-methylcytidine-3'-phosphate
  modified_base 11: mod_base = OTHER; note = 2'-O-methyluridine-3'-phosphate
  modified_base 12: mod_base = OTHER; note = 2'-O-methylcytidine-3'-phosphate
  modified_base 13: mod_base = OTHER; note = 2'-O-methyladenosine-3'-phosphate
  modified_base 14: mod_base = OTHER; note = 2'-deoxy-2'-fluorouridine-3'-phosphate
  modified_base 15: mod_base = OTHER; note = 2'-O-methylcytidine-3'-phosphate
  modified_base 16: mod_base = OTHER; note = 2'-deoxy-2'-fluorocytidine-3'-phosphate
  modified_base 17: mod_base = OTHER; note = 2'-O-methylcytidine-3'-phosphate
  modified_base 18: mod_base = OTHER; note = 2'-O-methyladenosine-3'-phosphate
  modified_base 19: mod_base = OTHER; note = 2'-O-methylguanosine-3'-phosphate
  modified_base 20: mod_base = OTHER; note = 2'-O-methylguanosine-3'-phosphate
  modified_base 21: mod_base = OTHER; note = 2'-O-methylguanosine-3'-phosphorothioate
  modified_base 22: mod_base = OTHER; note = 2'-O-methylcytidine-3'-phosphorothioate
  modified_base 23: mod_base = OTHER; note = 2'-O-methyladenosine
  misc_feature 1..4: note = RNA
  misc_feature 6..23: note = RNA
  misc_feature 5: note = DNA
aaggatgctctcatcccagggca

SEQ ID NO: 1147 - DNA, 23 bp, synthetic construct
  source 1..23: mol_type = other DNA
  modified_base 1: mod_base = OTHER; note = 2'-O-methyladenosine-3'-phosphorothioate
  modified_base 2: mod_base = OTHER; note = 2'-deoxy-2'-fluorouridine-3'-phosphorothioate
  modified_base 3: mod_base = OTHER; note = 2'-O-methylcytidine-3'-phosphate
  modified_base 4: mod_base = OTHER; note = 2'-O-methyluridine-3'-phosphate
  modified_base 6: mod_base = OTHER; note = 2'-O-methylguanosine-3'-phosphate
  modified_base 7: mod_base = OTHER; note = cytidine-2'-phosphate
  modified_base 8: mod_base = OTHER; note = 2'-O-methyluridine-3'-phosphate
  modified_base 9: mod_base = OTHER; note = 2'-O-methylcytidine-3'-phosphate
  modified_base 10: mod_base = OTHER; note = 2'-O-methyladenosine-3'-phosphate
  modified_base 11: mod_base = OTHER; note = 2'-O-methyluridine-3'-phosphate
  modified_base 12: mod_base = OTHER; note = 2'-O-methylguanosine-3'-phosphate
  modified_base 13: mod_base = OTHER; note = 2'-O-methyluridine-3'-phosphate
  modified_base 14: mod_base = OTHER; note = 2'-deoxy-2'-fluoroadenosine-3'-phosphate
  modified_base 15: mod_base = OTHER; note = 2'-O-methyluridine-3'-phosphate
  modified_base 16: mod_base = OTHER; note = 2'-deoxy-2'-fluorocytidine-3'-phosphate
  modified_base 17: mod_base = OTHER; note = 2'-O-methylcytidine-3'-phosphate
  modified_base 18: mod_base = OTHER; note = 2'-O-methyladenosine-3'-phosphate
  modified_base 19: mod_base = OTHER; note = 2'-O-methylcytidine-3'-phosphate
  modified_base 20: mod_base = OTHER; note = 2'-O-methylcytidine-3'-phosphate
  modified_base 21: mod_base = OTHER; note = 2'-O-methyluridine-3'-phosphorothioate
  modified_base 22: mod_base = OTHER; note = 2'-O-methyluridine-3'-phosphorothioate
  modified_base 23: mod_base = OTHER; note = 2'-O-methyluridine
  misc_feature 1..4: note = RNA
  misc_feature 6..23: note = RNA
  misc_feature 5: note = DNA
atcttgctcatgtatccaccttt

SEQ ID NO: 1148 - DNA, 23 bp, synthetic construct
  source 1..23: mol_type = other DNA
  modified_base 1: mod_base = OTHER; note = 2'-O-methyladenosine-3'-phosphorothioate
  modified_base 2: mod_base = OTHER; note = 2'-deoxy-2'-fluoroadenosine-3'-phosphorothioate
  modified_base 3: mod_base = OTHER; note = 2'-O-methyluridine-3'-phosphate
  modified_base 4: mod_base = OTHER; note = 2'-O-methylcytidine-3'-phosphate
  modified_base 6: mod_base = OTHER; note = 2'-O-methyluridine-3'-phosphate
  modified_base 7: mod_base = OTHER; note = guanosine-2'-phosphate
  modified_base 8: mod_base = OTHER; note = 2'-O-methylcytidine-3'-phosphate
  modified_base 9: mod_base = OTHER; note = 2'-O-methyluridine-3'-phosphate
  modified_base 10: mod_base = OTHER; note = 2'-O-methylcytidine-3'-phosphate
  modified_base 11: mod_base = OTHER; note = 2'-O-methyladenosine-3'-phosphate
  modified_base 12: mod_base = OTHER; note = 2'-O-methyluridine-3'-phosphate
  modified_base 13: mod_base = OTHER; note = 2'-O-methylguanosine-3'-phosphate
  modified_base 14: mod_base = OTHER; note = 2'-deoxy-2'-fluorouridine-3'-phosphate
  modified_base 15: mod_base = OTHER; note = 2'-O-methyladenosine-3'-phosphate
  modified_base 16: mod_base = OTHER; note = 2'-deoxy-2'-fluorouridine-3'-phosphate
  modified_base 17: mod_base = OTHER; note = 2'-O-methylcytidine-3'-phosphate
  modified_base 18: mod_base = OTHER; note = 2'-O-methylcytidine-3'-phosphate
  modified_base 19: mod_base = OTHER; note = 2'-O-methyladenosine-3'-phosphate
  modified_base 20: mod_base = OTHER; note = 2'-O-methylcytidine-3'-phosphate
  modified_base 21: mod_base = OTHER; note = 2'-O-methylcytidine-3'-phosphorothioate
  modified_base 22: mod_base = OTHER; note = 2'-O-methyluridine-3'-phosphorothioate
  modified_base 23: mod_base = OTHER; note = 2'-O-methyluridine
  misc_feature 1..4: note = RNA
  misc_feature 6..23: note = RNA
  misc_feature 5: note = DNA
aatcttgctcatgtatccacctt

SEQ ID NO: 1149 - DNA, 23 bp, synthetic construct
  source 1..23: mol_type = other DNA
  modified_base 1: mod_base = OTHER; note = 2'-O-methyladenosine-3'-phosphorothioate
  modified_base 2: mod_base = OTHER; note = 2'-deoxy-2'-fluoroadenosine-3'-phosphorothioate
  modified_base 3: mod_base = OTHER; note = 2'-O-methylguanosine-3'-phosphate
  modified_base 4: mod_base = OTHER; note = 2'-O-methyluridine-3'-phosphate
  modified_base 6: mod_base = OTHER; note = 2'-O-methylguanosine-3'-phosphate
  modified_base 7: mod_base = OTHER; note = cytidine-2'-phosphate
  modified_base 8: mod_base = OTHER; note = 2'-O-methyladenosine-3'-phosphate
  modified_base 9: mod_base = OTHER; note = 2'-O-methyladenosine-3'-phosphate
  modified_base 10: mod_base = OTHER; note = 2'-O-methyladenosine-3'-phosphate
  modified_base 11: mod_base = OTHER; note = 2'-O-methyluridine-3'-phosphate
  modified_base 12: mod_base = OTHER; note = 2'-O-methylcytidine-3'-phosphate
  modified_base 13: mod_base = OTHER; note = 2'-O-methyluridine-3'-phosphate
  modified_base 14: mod_base = OTHER; note = 2'-deoxy-2'-fluorouridine-3'-phosphate
  modified_base 15: mod_base = OTHER; note = 2'-O-methylguanosine-3'-phosphate
  modified_base 16: mod_base = OTHER; note = 2'-deoxy-2'-fluorocytidine-3'-phosphate
  modified_base 17: mod_base = OTHER; note = 2'-O-methyluridine-3'-phosphate
  modified_base 18: mod_base = OTHER; note = 2'-O-methylcytidine-3'-phosphate
  modified_base 19: mod_base = OTHER; note = 2'-O-methyladenosine-3'-phosphate
  modified_base 20: mod_base = OTHER; note = 2'-O-methyluridine-3'-phosphate
  modified_base 21: mod_base = OTHER; note = 2'-O-methylguanosine-3'-phosphorothioate
  modified_base 22: mod_base = OTHER; note = 2'-O-methyluridine-3'-phosphorothioate
  modified_base 23: mod_base = OTHER; note = 2'-O-methyladenosine
  misc_feature 1..4: note = RNA
  misc_feature 6..23: note = RNA
  misc_feature 5: note = DNA
aagttgcaaatcttgctcatgta

SEQ ID NO: 1150 - DNA, 23 bp, synthetic construct
  source 1..23: mol_type = other DNA
  modified_base 1: mod_base = OTHER; note = 2'-O-methyladenosine-3'-phosphorothioate
  modified_base 2: mod_base = OTHER; note = 2'-deoxy-2'-fluoroadenosine-3'-phosphorothioate
  modified_base 3: mod_base = OTHER; note = 2'-O-methyladenosine-3'-phosphate
  modified_base 4: mod_base = OTHER; note = 2'-O-methylguanosine-3'-phosphate
  modified_base 6: mod_base = OTHER; note = 2'-O-methyluridine-3'-phosphate
  modified_base 7: mod_base = OTHER; note = guanosine-2'-phosphate
  modified_base 8: mod_base = OTHER; note = 2'-O-methylcytidine-3'-phosphate
  modified_base 9: mod_base = OTHER; note = 2'-O-methyladenosine-3'-phosphate
  modified_base 10: mod_base = OTHER; note = 2'-O-methyladenosine-3'-phosphate
  modified_base 11: mod_base = OTHER; note = 2'-O-methyladenosine-3'-phosphate
  modified_base 12: mod_base = OTHER; note = 2'-O-methyluridine-3'-phosphate
  modified_base 13: mod_base = OTHER; note = 2'-O-methylcytidine-3'-phosphate
  modified_base 14: mod_base = OTHER; note = 2'-deoxy-2'-fluorouridine-3'-phosphate
  modified_base 15: mod_base = OTHER; note = 2'-O-methyluridine-3'-phosphate
  modified_base 16: mod_base = OTHER; note = 2'-deoxy-2'-fluoroguanosine-3'-phosphate
  modified_base 17: mod_base = OTHER; note = 2'-O-methylcytidine-3'-phosphate
  modified_base 18: mod_base = OTHER; note = 2'-O-methyluridine-3'-phosphate
  modified_base 19: mod_base = OTHER; note = 2'-O-methylcytidine-3'-phosphate
  modified_base 20: mod_base = OTHER; note = 2'-O-methyladenosine-3'-phosphate
  modified_base 21: mod_base = OTHER; note = 2'-O-methyluridine-3'-phosphorothioate
  modified_base 22: mod_base = OTHER; note = 2'-O-methylguanosine-3'-phosphorothioate
  modified_base 23: mod_base = OTHER; note = 2'-O-methyluridine
  misc_feature 1..4: note = RNA
  misc_feature 6..23: note = RNA
  misc_feature 5: note = DNA
aaagttgcaaatcttgctcatgt

SEQ ID NO: 1151 - DNA, 23 bp, synthetic construct
  source 1..23: mol_type = other DNA
  modified_base 1: mod_base = OTHER; note = 2'-O-methyladenosine-3'-phosphorothioate
  modified_base 2: mod_base = OTHER; note = 2'-deoxy-2'-fluoroadenosine-3'-phosphorothioate
  modified_base 3: mod_base = OTHER; note = 2'-O-methyladenosine-3'-phosphate
  modified_base 4: mod_base = OTHER; note = 2'-O-methyluridine-3'-phosphate
  modified_base 6: mod_base = OTHER; note = 2'-O-methylguanosine-3'-phosphate
  modified_base 7: mod_base = OTHER; note = guanosine-2'-phosphate
  modified_base 8: mod_base = OTHER; note = 2'-O-methyluridine-3'-phosphate
  modified_base 9: mod_base = OTHER; note = 2'-O-methyladenosine-3'-phosphate
  modified_base 10: mod_base = OTHER; note = 2'-O-methylguanosine-3'-phosphate
  modified_base 11: mod_base = OTHER; note = 2'-O-methylcytidine-3'-phosphate
  modified_base 12: mod_base = OTHER; note = 2'-O-methyladenosine-3'-phosphate
  modified_base 13: mod_base = OTHER; note = 2'-O-methyladenosine-3'-phosphate
  modified_base 14: mod_base = OTHER; note = 2'-deoxy-2'-fluoroguanosine-3'-phosphate
  modified_base 15: mod_base = OTHER; note = 2'-O-methyluridine-3'-phosphate
  modified_base 16: mod_base = OTHER; note = 2'-deoxy-2'-fluorouridine-3'-phosphate
  modified_base 17: mod_base = OTHER; note = 2'-O-methylguanosine-3'-phosphate
  modified_base 18: mod_base = OTHER; note = 2'-O-methylcytidine-3'-phosphate
  modified_base 19: mod_base = OTHER; note = 2'-O-methyladenosine-3'-phosphate
  modified_base 20: mod_base = OTHER; note = 2'-O-methyladenosine-3'-phosphate
  modified_base 21: mod_base = OTHER; note = 2'-O-methyladenosine-3'-phosphorothioate
  modified_base 22: mod_base = OTHER; note = 2'-O-methyluridine-3'-phosphorothioate
  modified_base 23: mod_base = OTHER; note = 2'-O-methylcytidine
  misc_feature 1..4: note = RNA
  misc_feature 6..23: note = RNA
  misc_feature 5: note = DNA
aaatgggtagcaagttgcaaatc

SEQ ID NO: 1152 - DNA, 23 bp, synthetic construct
  source 1..23: mol_type = other DNA
  modified_base 1: mod_base = OTHER; note = 2'-O-methyladenosine-3'-phosphorothioate
  modified_base 2: mod_base = OTHER; note = 2'-deoxy-2'-fluoroguanosine-3'-phosphorothioate
  modified_base 3: mod_base = OTHER; note = 2'-O-methylguanosine-3'-phosphate
  modified_base 4: mod_base = OTHER; note = 2'-O-methylcytidine-3'-phosphate
  modified_base 6: mod_base = OTHER; note = 2'-O-methylguanosine-3'-phosphate
  modified_base 7: mod_base = OTHER; note = guanosine-2'-phosphate
  modified_base 8: mod_base = OTHER; note = 2'-O-methylguanosine-3'-phosphate
  modified_base 9: mod_base = OTHER; note = 2'-O-methyluridine-3'-phosphate
  modified_base 10: mod_base = OTHER; note = 2'-O-methyladenosine-3'-phosphate
  modified_base 11: mod_base = OTHER; note = 2'-O-methylcytidine-3'-phosphate
  modified_base 12: mod_base = OTHER; note = 2'-O-methyladenosine-3'-phosphate
  modified_base 13: mod_base = OTHER; note = 2'-O-methylguanosine-3'-phosphate
  modified_base 14: mod_base = OTHER; note = 2'-deoxy-2'-fluoroguanosine-3'-phosphate
  modified_base 15: mod_base = OTHER; note = 2'-O-methylguanosine-3'-phosphate
  modified_base 16: mod_base = OTHER; note = 2'-deoxy-2'-fluorocytidine-3'-phosphate
  modified_base 17: mod_base = OTHER; note = 2'-O-methyladenosine-3'-phosphate
  modified_base 18: mod_base = OTHER; note = 2'-O-methylguanosine-3'-phosphate
  modified_base 19: mod_base = OTHER; note = 2'-O-methylcytidine-3'-phosphate
  modified_base 20: mod_base = OTHER; note = 2'-O-methyladenosine-3'-phosphate
  modified_base 21: mod_base = OTHER; note = 2'-O-methyluridine-3'-phosphorothioate
  modified_base 22: mod_base = OTHER; note = 2'-O-methyluridine-3'-phosphorothioate
  modified_base 23: mod_base = OTHER; note = 2'-O-methyladenosine
  misc_feature 1..4: note = RNA
  misc_feature 6..23: note = RNA
  misc_feature 5: note = DNA
aggcagggtacagggcagcatta

SEQ ID NO: 1153 - DNA, 23 bp, synthetic construct
  source 1..23: mol_type = other DNA
  modified_base 1: mod_base = OTHER; note = 2'-O-methyladenosine-3'-phosphorothioate
  modified_base 2: mod_base = OTHER; note = 2'-deoxy-2'-fluorocytidine-3'-phosphorothioate
  modified_base 3: mod_base = OTHER; note = 2'-O-methyluridine-3'-phosphate
  modified_base 4: mod_base = OTHER; note = 2'-O-methylcytidine-3'-phosphate
  modified_base 6: mod_base = OTHER; note = 2'-O-methylguanosine-3'-phosphate
  modified_base 7: mod_base = OTHER; note = guanosine-2'-phosphate
  modified_base 8: mod_base = OTHER; note = 2'-O-methyladenosine-3'-phosphate
  modified_base 9: mod_base = OTHER; note = 2'-O-methylcytidine-3'-phosphate
  modified_base 10: mod_base = OTHER; note = 2'-O-methyladenosine-3'-phosphate
  modified_base 11: mod_base = OTHER; note = 2'-O-methyladenosine-3'-phosphate
  modified_base 12: mod_base = OTHER; note = 2'-O-methyluridine-3'-phosphate
  modified_base 13: mod_base = OTHER; note = 2'-O-methylcytidine-3'-phosphate
  modified_base 14: mod_base = OTHER; note = 2'-deoxy-2'-fluoroguanosine-3'-phosphate
  modified_base 15: mod_base = OTHER; note = 2'-O-methylcytidine-3'-phosphate
  modified_base 16: mod_base = OTHER; note = 2'-deoxy-2'-fluoroadenosine-3'-phosphate
  modified_base 17: mod_base = OTHER; note = 2'-O-methyladenosine-3'-phosphate
  modified_base 18: mod_base = OTHER; note = 2'-O-methyluridine-3'-phosphate
  modified_base 19: mod_base = OTHER; note = 2'-O-methylguanosine-3'-phosphate
  modified_base 20: mod_base = OTHER; note = 2'-O-methylguanosine-3'-phosphate
  modified_base 21: mod_base = OTHER; note = 2'-O-methylcytidine-3'-phosphorothioate
  modified_base 22: mod_base = OTHER; note = 2'-O-methyladenosine-3'-phosphorothioate
  modified_base 23: mod_base = OTHER; note = 2'-O-methylguanosine
  misc_feature 1..4: note = RNA
  misc_feature 6..23: note = RNA
  misc_feature 5: note = DNA
actctggacaatcgcaatggcag

SEQ ID NO: 1154 - DNA, 23 bp, synthetic construct
  source 1..23: mol_type = other DNA
  modified_base 1: mod_base = OTHER; note = 2'-O-methyladenosine-3'-phosphorothioate
  modified_base 2: mod_base = OTHER; note = 2'-deoxy-2'-fluorouridine-3'-phosphorothioate
  modified_base 3: mod_base = OTHER; note = 2'-O-methylcytidine-3'-phosphate
  modified_base 4: mod_base = OTHER; note = 2'-O-methyluridine-3'-phosphate
  modified_base 6: mod_base = OTHER; note = 2'-O-methyluridine-3'-phosphate
  modified_base 7: mod_base = OTHER; note = guanosine-2'-phosphate
  modified_base 8: mod_base = OTHER; note = 2'-O-methylguanosine-3'-phosphate
  modified_base 9: mod_base = OTHER; note = 2'-O-methyladenosine-3'-phosphate
  modified_base 10: mod_base = OTHER; note = 2'-O-methylcytidine-3'-phosphate
  modified_base 11: mod_base = OTHER; note = 2'-O-methyladenosine-3'-phosphate
  modified_base 12: mod_base = OTHER; note = 2'-O-methyladenosine-3'-phosphate
  modified_base 13: mod_base = OTHER; note = 2'-O-methyluridine-3'-phosphate
  modified_base 14: mod_base = OTHER; note = 2'-deoxy-2'-fluorocytidine-3'-phosphate
  modified_base 15: mod_base = OTHER; note = 2'-O-methylguanosine-3'-phosphate
  modified_base 16: mod_base = OTHER; note = 2'-deoxy-2'-fluorocytidine-3'-phosphate
  modified_base 17: mod_base = OTHER; note = 2'-O-methyladenosine-3'-phosphate
  modified_base 18: mod_base = OTHER; note = 2'-O-methyladenosine-3'-phosphate
  modified_base 19: mod_base = OTHER; note = 2'-O-methyluridine-3'-phosphate
  modified_base 20: mod_base = OTHER; note = 2'-O-methylguanosine-3'-phosphate
  modified_base 21: mod_base = OTHER; note = 2'-O-methylguanosine-3'-phosphorothioate
  modified_base 22: mod_base = OTHER; note = 2'-O-methylcytidine-3'-phosphorothioate
  modified_base 23: mod_base = OTHER; note = 2'-O-methyladenosine
  misc_feature 1..4: note = RNA
  misc_feature 6..23: note = RNA
  misc_feature 5: note = DNA
atctctggacaatcgcaatggca

SEQ ID NO: 1155 - DNA, 23 bp, synthetic construct
  source 1..23: mol_type = other DNA
  modified_base 1: mod_base = OTHER; note = 2'-O-methyladenosine-3'-phosphorothioate
  modified_base 2: mod_base = OTHER; note = 2'-deoxy-2'-fluoroadenosine-3'-phosphorothioate
  modified_base 3: mod_base = OTHER; note = 2'-O-methylguanosine-3'-phosphate
  modified_base 4: mod_base = OTHER; note = 2'-O-methyluridine-3'-phosphate
  modified_base 6: mod_base = OTHER; note = 2'-O-methyluridine-3'-phosphate
  modified_base 7: mod_base = OTHER; note = cytidine-2'-phosphate
  modified_base 8: mod_base = OTHER; note = 2'-O-methyluridine-3'-phosphate
  modified_base 9: mod_base = OTHER; note = 2'-O-methylguanosine-3'-phosphate
  modified_base 10: mod_base = OTHER; note = 2'-O-methylguanosine-3'-phosphate
  modified_base 11: mod_base = OTHER; note = 2'-O-methyladenosine-3'-phosphate
  modified_base 12: mod_base = OTHER; note = 2'-O-methylcytidine-3'-phosphate
  modified_base 13: mod_base = OTHER; note = 2'-O-methyladenosine-3'-phosphate
  modified_base 14: mod_base = OTHER; note = 2'-deoxy-2'-fluoroadenosine-3'-phosphate
  modified_base 15: mod_base = OTHER; note = 2'-O-methyluridine-3'-phosphate
  modified_base 16: mod_base = OTHER; note = 2'-deoxy-2'-fluorocytidine-3'-phosphate
  modified_base 17: mod_base = OTHER; note = 2'-O-methylguanosine-3'-phosphate
  modified_base 18: mod_base = OTHER; note = 2'-O-methylcytidine-3'-phosphate
  modified_base 19: mod_base = OTHER; note = 2'-O-methyladenosine-3'-phosphate
  modified_base 20: mod_base = OTHER; note = 2'-O-methyladenosine-3'-phosphate
  modified_base 21: mod_base = OTHER; note = 2'-O-methyluridine-3'-phosphorothioate
  modified_base 22: mod_base = OTHER; note = 2'-O-methylguanosine-3'-phosphorothioate
  modified_base 23: mod_base = OTHER; note = 2'-O-methylguanosine
  misc_feature 1..4: note = RNA
  misc_feature 6..23: note = RNA
  misc_feature 5: note = DNA
aagtctctggacaatcgcaatgg

SEQ ID NO: 1156 - DNA, 23 bp, synthetic construct
  source 1..23: mol_type = other DNA
  modified_base 1: mod_base = OTHER; note = 2'-O-methyladenosine-3'-phosphorothioate
  modified_base 2: mod_base = OTHER; note = 2'-deoxy-2'-fluoroguanosine-3'-phosphorothioate
  modified_base 3: mod_base = OTHER; note = 2'-O-methylcytidine-3'-phosphate
  modified_base 4: mod_base = OTHER; note = 2'-O-methylcytidine-3'-phosphate
  modified_base 6: mod_base = OTHER; note = 2'-O-methyluridine-3'-phosphate
  modified_base 7: mod_base = OTHER; note = guanosine-2'-phosphate
  modified_base 8: mod_base = OTHER; note = 2'-O-methyluridine-3'-phosphate
  modified_base 9: mod_base = OTHER; note = 2'-O-methylcytidine-3'-phosphate
  modified_base 10: mod_base = OTHER; note = 2'-O-methyladenosine-3'-phosphate
  modified_base 11: mod_base = OTHER; note = 2'-O-methylcytidine-3'-phosphate
  modified_base 12: mod_base = OTHER; note = 2'-O-methylcytidine-3'-phosphate
  modified_base 13: mod_base = OTHER; note = 2'-O-methyladenosine-3'-phosphate
  modified_base 14: mod_base = OTHER; note = 2'-deoxy-2'-fluoroguanosine-3'-phosphate
  modified_base 15: mod_base = OTHER; note = 2'-O-methyluridine-3'-phosphate
  modified_base 16: mod_base = OTHER; note = 2'-deoxy-2'-fluorocytidine-3'-phosphate
  modified_base 17: mod_base = OTHER; note = 2'-O-methyluridine-3'-phosphate
  modified_base 18: mod_base = OTHER; note = 2'-O-methylcytidine-3'-phosphate
  modified_base 19: mod_base = OTHER; note = 2'-O-methyluridine-3'-phosphate
  modified_base 20: mod_base = OTHER; note = 2'-O-methylguanosine-3'-phosphate
  modified_base 21: mod_base = OTHER; note = 2'-O-methylguanosine-3'-phosphorothioate
  modified_base 22: mod_base = OTHER; note = 2'-O-methyladenosine-3'-phosphorothioate
  modified_base 23: mod_base = OTHER; note = 2'-O-methylcytidine
  misc_feature 1..4: note = RNA
  misc_feature 6..23: note = RNA
  misc_feature 5: note = DNA
agccatgtcaccagtctctggac

SEQ ID NO: 1157 - DNA, 23 bp, synthetic construct
  source 1..23: mol_type = other DNA
  modified_base 1: mod_base = OTHER; note = 2'-O-methyladenosine-3'-phosphorothioate
  modified_base 2: mod_base = OTHER; note = 2'-deoxy-2'-fluorouridine-3'-phosphorothioate
  modified_base 3: mod_base = OTHER; note = 2'-O-methylguanosine-3'-phosphate
  modified_base 4: mod_base = OTHER; note = 2'-O-methylguanosine-3'-phosphate
  modified_base 6: mod_base = OTHER; note = 2'-O-methyladenosine-3'-phosphate
  modified_base 7: mod_base = OTHER; note = guanosine-2'-phosphate
  modified_base 8: mod_base = OTHER; note = 2'-O-methylcytidine-3'-phosphate
  modified_base 9: mod_base = OTHER; note = 2'-O-methylcytidine-3'-phosphate
  modified_base 10: mod_base = OTHER; note = 2'-O-methyladenosine-3'-phosphate
  modified_base 11: mod_base = OTHER; note = 2'-O-methyluridine-3'-phosphate
  modified_base 12: mod_base = OTHER; note = 2'-O-methylguanosine-3'-phosphate
  modified_base 13: mod_base = OTHER; note = 2'-O-methyluridine-3'-phosphate
  modified_base 14: mod_base = OTHER; note = 2'-deoxy-2'-fluorocytidine-3'-phosphate
  modified_base 15: mod_base = OTHER; note = 2'-O-methyladenosine-3'-phosphate
  modified_base 16: mod_base = OTHER; note = 2'-deoxy-2'-fluorocytidine-3'-phosphate
  modified_base 17: mod_base = OTHER; note = 2'-O-methylcytidine-3'-phosphate
  modified_base 18: mod_base = OTHER; note = 2'-O-methyladenosine-3'-phosphate
  modified_base 19: mod_base = OTHER; note = 2'-O-methylguanosine-3'-phosphate
  modified_base 20: mod_base = OTHER; note = 2'-O-methyluridine-3'-phosphate
  modified_base 21: mod_base = OTHER; note = 2'-O-methylcytidine-3'-phosphorothioate
  modified_base 22: mod_base = OTHER; note = 2'-O-methyluridine-3'-phosphorothioate
  modified_base 23: mod_base = OTHER; note = 2'-O-methylcytidine
  misc_feature 1..4: note = RNA
  misc_feature 6..23: note = RNA
  misc_feature 5: note = DNA
atggaagccatgtcaccagtctc

SEQ ID NO: 1158 - DNA, 23 bp, synthetic construct
  source 1..23: mol_type = other DNA
  modified_base 1: mod_base = OTHER; note = 2'-O-methyladenosine-3'-phosphorothioate
  modified_base 2: mod_base = OTHER; note = 2'-deoxy-2'-fluoroadenosine-3'-phosphorothioate
  modified_base 3: mod_base = OTHER; note = 2'-O-methyluridine-3'-phosphate
  modified_base 4: mod_base = OTHER; note = 2'-O-methylcytidine-3'-phosphate
  modified_base 6: mod_base = OTHER; note = 2'-O-methylguanosine-3'-phosphate
  modified_base 7: mod_base = OTHER; note = guanosine-2'-phosphate
  modified_base 8: mod_base = OTHER; note = 2'-O-methyladenosine-3'-phosphate
  modified_base 9: mod_base = OTHER; note = 2'-O-methyladenosine-3'-phosphate
  modified_base 10: mod_base = OTHER; note = 2'-O-methylguanosine-3'-phosphate
  modified_base 11: mod_base = OTHER; note = 2'-O-methylcytidine-3'-phosphate
  modified_base 12: mod_base = OTHER; note = 2'-O-methylcytidine-3'-phosphate
  modified_base 13: mod_base = OTHER; note = 2'-O-methyladenosine-3'-phosphate
  modified_base 14: mod_base = OTHER; note = 2'-deoxy-2'-fluorouridine-3'-phosphate
  modified_base 15: mod_base = OTHER; note = 2'-O-methylguanosine-3'-phosphate
  modified_base 16: mod_base = OTHER; note = 2'-deoxy-2'-fluorouridine-3'-phosphate
  modified_base 17: mod_base = OTHER; note = 2'-O-methylcytidine-3'-phosphate
  modified_base 18: mod_base = OTHER; note = 2'-O-methyladenosine-3'-phosphate
  modified_base 19: mod_base = OTHER; note = 2'-O-methylcytidine-3'-phosphate
  modified_base 20: mod_base = OTHER; note = 2'-O-methylcytidine-3'-phosphate
  modified_base 21: mod_base = OTHER; note = 2'-O-methyladenosine-3'-phosphorothioate
  modified_base 22: mod_base = OTHER; note = 2'-O-methylguanosine-3'-phosphorothioate
  modified_base 23: mod_base = OTHER; note = 2'-O-methyluridine
  misc_feature 1..4: note = RNA
  misc_feature 6..23: note = RNA
  misc_feature 5: note = DNA
aatctggaagccatgtcaccagt

SEQ ID NO: 1159 - DNA, 23 bp, synthetic construct
  source 1..23: mol_type = other DNA
  modified_base 1: mod_base = OTHER; note = 2'-O-methyladenosine-3'-phosphorothioate
  modified_base 2: mod_base = OTHER; note = 2'-deoxy-2'-fluorouridine-3'-phosphorothioate
  modified_base 3: mod_base = OTHER; note = 2'-O-methyladenosine-3'-phosphate
  modified_base 4: mod_base = OTHER; note = 2'-O-methyluridine-3'-phosphate
  modified_base 6: mod_base = OTHER; note = 2'-O-methyluridine-3'-phosphate
  modified_base 7: mod_base = OTHER; note = guanosine-2'-phosphate
  modified_base 8: mod_base = OTHER; note = 2'-O-methylguanosine-3'-phosphate
  modified_base 9: mod_base = OTHER; note = 2'-O-methyladenosine-3'-phosphate
  modified_base 10: mod_base = OTHER; note = 2'-O-methyladenosine-3'-phosphate
  modified_base 11: mod_base = OTHER; note = 2'-O-methylguanosine-3'-phosphate
  modified_base 12: mod_base = OTHER; note = 2'-O-methylcytidine-3'-phosphate
  modified_base 13: mod_base = OTHER; note = 2'-O-methylcytidine-3'-phosphate
  modified_base 14: mod_base = OTHER; note = 2'-deoxy-2'-fluoroadenosine-3'-phosphate
  modified_base 15: mod_base = OTHER; note = 2'-O-methyluridine-3'-phosphate
  modified_base 16: mod_base = OTHER; note = 2'-deoxy-2'-fluoroguanosine-3'-phosphate
  modified_base 17: mod_base = OTHER; note = 2'-O-methyluridine-3'-phosphate
  modified_base 18: mod_base = OTHER; note = 2'-O-methylcytidine-3'-phosphate
  modified_base 19: mod_base = OTHER; note = 2'-O-methyladenosine-3'-phosphate
  modified_base 20: mod_base = OTHER; note = 2'-O-methylcytidine-3'-phosphate
  modified_base 21: mod_base = OTHER; note = 2'-O-methylcytidine-3'-phosphorothioate
  modified_base 22: mod_base = OTHER; note = 2'-O-methyladenosine-3'-phosphorothioate
  modified_base 23: mod_base = OTHER; note = 2'-O-methylguanosine
  misc_feature 1..4: note = RNA
  misc_feature 6..23: note = RNA
  misc_feature 5: note = DNA
atatctggaagccatgtcaccag

SEQ ID NO: 1160 - DNA, 23 bp, synthetic construct
  source 1..23: mol_type = other DNA
  modified_base 1: mod_base = OTHER; note = 2'-O-methyladenosine-3'-phosphorothioate
  modified_base 2: mod_base = OTHER; note = 2'-deoxy-2'-fluorouridine-3'-phosphorothioate
  modified_base 3: mod_base = OTHER; note = 2'-O-methylcytidine-3'-phosphate
  modified_base 4: mod_base = OTHER; note = 2'-O-methylguanosine-3'-phosphate
  modified_base 6: mod_base = OTHER; note = 2'-O-methylguanosine-3'-phosphate
  modified_base 7: mod_base = OTHER; note = cytidine-2'-phosphate
  modified_base 8: mod_base = OTHER; note = 2'-O-methyladenosine-3'-phosphate
  modified_base 9: mod_base = OTHER; note = 2'-O-methyluridine-3'-phosphate
  modified_base 10: mod_base = OTHER; note = 2'-O-methyladenosine-3'-phosphate
  modified_base 11: mod_base = OTHER; note = 2'-O-methyluridine-3'-phosphate
  modified_base 12: mod_base = OTHER; note = 2'-O-methylcytidine-3'-phosphate
  modified_base 13: mod_base = OTHER; note = 2'-O-methyluridine-3'-phosphate
  modified_base 14: mod_base = OTHER; note = 2'-deoxy-2'-fluoroguanosine-3'-phosphate
  modified_base 15: mod_base = OTHER; note = 2'-O-methylguanosine-3'-phosphate
  modified_base 16: mod_base = OTHER; note = 2'-deoxy-2'-fluoroadenosine-3'-phosphate
  modified_base 17: mod_base = OTHER; note = 2'-O-methyladenosine-3'-phosphate
  modified_base 18: mod_base = OTHER; note = 2'-O-methylguanosine-3'-phosphate
  modified_base 19: mod_base = OTHER; note = 2'-O-methylcytidine-3'-phosphate
  modified_base 20: mod_base = OTHER; note = 2'-O-methylcytidine-3'-phosphate
  modified_base 21: mod_base = OTHER; note = 2'-O-methyladenosine-3'-phosphorothioate
  modified_base 22: mod_base = OTHER; note = 2'-O-methyluridine-3'-phosphorothioate
  modified_base 23: mod_base = OTHER; note = 2'-O-methylguanosine
  misc_feature 1..4: note = RNA
  misc_feature 6..23: note = RNA
  misc_feature 5: note = DNA
atcgggcatatctggaagccatg

SEQ ID NO: 1161 - DNA, 23 bp, synthetic construct
  source 1..23: mol_type = other DNA
  modified_base 1: mod_base = OTHER; note = 2'-O-methyladenosine-3'-phosphorothioate
  modified_base 2: mod_base = OTHER; note = 2'-deoxy-2'-fluoroguanosine-3'-phosphorothioate
  modified_base 3: mod_base = OTHER; note = 2'-O-methyluridine-3'-phosphate
  modified_base 4: mod_base = OTHER; note = 2'-O-methylcytidine-3'-phosphate
  modified_base 6: mod_base = OTHER; note = 2'-O-methylguanosine-3'-phosphate
  modified_base 7: mod_base = OTHER; note = guanosine-2'-phosphate
  modified_base 8: mod_base = OTHER; note = 2'-O-methylcytidine-3'-phosphate
  modified_base 9: mod_base = OTHER; note = 2'-O-methyladenosine-3'-phosphate
  modified_base 10: mod_base = OTHER; note = 2'-O-methyluridine-3'-phosphate
  modified_base 11: mod_base = OTHER; note = 2'-O-methyladenosine-3'-phosphate
  modified_base 12: mod_base = OTHER; note = 2'-O-methyluridine-3'-phosphate
  modified_base 13: mod_base = OTHER; note = 2'-O-methylcytidine-3'-phosphate
  modified_base 14: mod_base = OTHER; note = 2'-deoxy-2'-fluorouridine-3'-phosphate
  modified_base 15: mod_base = OTHER; note = 2'-O-methylguanosine-3'-phosphate
  modified_base 16: mod_base = OTHER; note = 2'-deoxy-2'-fluoroguanosine-3'-phosphate
  modified_base 17: mod_base = OTHER; note = 2'-O-methyladenosine-3'-phosphate
  modified_base 18: mod_base = OTHER; note = 2'-O-methyladenosine-3'-phosphate
  modified_base 19: mod_base = OTHER; note = 2'-O-methylguanosine-3'-phosphate
  modified_base 20: mod_base = OTHER; note = 2'-O-methylcytidine-3'-phosphate
  modified_base 21: mod_base = OTHER; note = 2'-O-methylcytidine-3'-phosphorothioate
  modified_base 22: mod_base = OTHER; note = 2'-O-methyladenosine-3'-phosphorothioate
  modified_base 23: mod_base = OTHER; note = 2'-O-methyluridine
  misc_feature 1..4: note = RNA
  misc_feature 6..23: note = RNA
  misc_feature 5: note = DNA
agtcgggcatatctggaagccat

SEQ ID NO: 1162 - DNA, 23 bp, synthetic construct
  source 1..23: mol_type = other DNA
  modified_base 1: mod_base = OTHER; note = 2'-O-methyladenosine-3'-phosphorothioate
  modified_base 2: mod_base = OTHER; note = 2'-deoxy-2'-fluoroguanosine-3'-phosphorothioate
  modified_base 3: mod_base = OTHER; note = 2'-O-methyluridine-3'-phosphate
  modified_base 4: mod_base = OTHER; note = 2'-O-methylguanosine-3'-phosphate
  modified_base 6: mod_base = OTHER; note = 2'-O-methylguanosine-3'-phosphate
  modified_base 7: mod_base = OTHER; note = guanosine-2'-phosphate
  modified_base 8: mod_base = OTHER; note = 2'-O-methyluridine-3'-phosphate
  modified_base 9: mod_base = OTHER; note = 2'-O-methylcytidine-3'-phosphate
  modified_base 10: mod_base = OTHER; note = 2'-O-methyladenosine-3'-phosphate
  modified_base 11: mod_base = OTHER; note = 2'-O-methylcytidine-3'-phosphate
  modified_base 12: mod_base = OTHER; note = 2'-O-methylcytidine-3'-phosphate
  modified_base 13: mod_base = OTHER; note = 2'-O-methylcytidine-3'-phosphate
  modified_base 14: mod_base = OTHER; note = 2'-deoxy-2'-fluoroadenosine-3'-phosphate
  modified_base 15: mod_base = OTHER; note = 2'-O-methylcytidine-3'-phosphate
  modified_base 16: mod_base = OTHER; note = 2'-deoxy-2'-fluorouridine-3'-phosphate
  modified_base 17: mod_base = OTHER; note = 2'-O-methylguanosine-3'-phosphate
  modified_base 18: mod_base = OTHER; note = 2'-O-methylcytidine-3'-phosphate
  modified_base 19: mod_base = OTHER; note = 2'-O-methyladenosine-3'-phosphate
  modified_base 20: mod_base = OTHER; note = 2'-O-methyladenosine-3'-phosphate
  modified_base 21: mod_base = OTHER; note = 2'-O-methylcytidine-3'-phosphorothioate
  modified_base 22: mod_base = OTHER; note = 2'-O-methylcytidine-3'-phosphorothioate
  modified_base 23: mod_base = OTHER; note = 2'-O-methyladenosine
  misc_feature 1..4: note = RNA
  misc_feature 6..23: note = RNA
  misc_feature 5: note = DNA
agtgaggtcacccactgcaacca

SEQ ID NO: 1163 - DNA, 23 bp, synthetic construct
  source 1..23: mol_type = other DNA
  modified_base 1: mod_base = OTHER; note = 2'-O-methyladenosine-3'-phosphorothioate
  modified_base 2: mod_base = OTHER; note = 2'-deoxy-2'-fluorocytidine-3'-phosphorothioate
  modified_base 3: mod_base = OTHER; note = 2'-O-methyladenosine-3'-phosphate
  modified_base 4: mod_base = OTHER; note = 2'-O-methylcytidine-3'-phosphate
  modified_base 6: mod_base = OTHER; note = 2'-O-methylguanosine-3'-phosphate
  modified_base 7: mod_base = OTHER; note = guanosine-2'-phosphate
  modified_base 8: mod_base = OTHER; note = 2'-O-methylcytidine-3'-phosphate
  modified_base 9: mod_base = OTHER; note = 2'-O-methyladenosine-3'-phosphate
  modified_base 10: mod_base = OTHER; note = 2'-O-methyluridine-3'-phosphate
  modified_base 11: mod_base = OTHER; note = 2'-O-methyluridine-3'-phosphate
  modified_base 12: mod_base = OTHER; note = 2'-O-methyluridine-3'-phosphate
  modified_base 13: mod_base = OTHER; note = 2'-O-methylguanosine-3'-phosphate
  modified_base 14: mod_base = OTHER; note = 2'-deoxy-2'-fluoroguanosine-3'-phosphate
  modified_base 15: mod_base = OTHER; note = 2'-O-methylguanosine-3'-phosphate
  modified_base 16: mod_base = OTHER; note = 2'-deoxy-2'-fluoroadenosine-3'-phosphate
  modified_base 17: mod_base = OTHER; note = 2'-O-methylcytidine-3'-phosphate
  modified_base 18: mod_base = OTHER; note = 2'-O-methylcytidine-3'-phosphate
  modified_base 19: mod_base = OTHER; note = 2'-O-methyluridine-3'-phosphate
  modified_base 20: mod_base = OTHER; note = 2'-O-methylguanosine-3'-phosphate
  modified_base 21: mod_base = OTHER; note = 2'-O-methylguanosine-3'-phosphorothioate
  modified_base 22: mod_base = OTHER; note = 2'-O-methyladenosine-3'-phosphorothioate
  modified_base 23: mod_base = OTHER; note = 2'-O-methylguanosine
  misc_feature 1..4: note = RNA
  misc_feature 6..23: note = RNA
  misc_feature 5: note = DNA
acactggcatttgggacctggag

SEQ ID NO: 1164 - DNA, 23 bp, synthetic construct
  source 1..23: mol_type = other DNA
  modified_base 1: mod_base = OTHER; note = 2'-O-methyladenosine-3'-phosphorothioate
  modified_base 2: mod_base = OTHER; note = 2'-deoxy-2'-fluoroadenosine-3'-phosphorothioate
  modified_base 3: mod_base = OTHER; note = 2'-O-methyladenosine-3'-phosphate
  modified_base 4: mod_base = OTHER; note = 2'-O-methylguanosine-3'-phosphate
  modified_base 6: mod_base = OTHER; note = 2'-O-methyladenosine-3'-phosphate
  modified_base 7: mod_base = OTHER; note = guanosine-2'-phosphate
  modified_base 8: mod_base = OTHER; note = 2'-O-methyluridine-3'-phosphate
  modified_base 9: mod_base = OTHER; note = 2'-O-methyluridine-3'-phosphate
  modified_base 10: mod_base = OTHER; note = 2'-O-methylcytidine-3'-phosphate
  modified_base 11: mod_base = OTHER; note = 2'-O-methyladenosine-3'-phosphate
  modified_base 12: mod_base = OTHER; note = 2'-O-methylguanosine-3'-phosphate
  modified_base 13: mod_base = OTHER; note = 2'-O-methylguanosine-3'-phosphate
  modified_base 14: mod_base = OTHER; note = 2'-deoxy-2'-fluorocytidine-3'-phosphate
  modified_base 15: mod_base = OTHER; note = 2'-O-methyluridine-3'-phosphate
  modified_base 16: mod_base = OTHER; note = 2'-deoxy-2'-fluoroguanosine-3'-phosphate
  modified_base 17: mod_base = OTHER; note = 2'-O-methylguanosine-3'-phosphate
  modified_base 18: mod_base = OTHER; note = 2'-O-methyladenosine-3'-phosphate
  modified_base 19: mod_base = OTHER; note = 2'-O-methylcytidine-3'-phosphate
  modified_base 20: mod_base = OTHER; note = 2'-O-methylcytidine-3'-phosphate
  modified_base 21: mod_base = OTHER; note = 2'-O-methyluridine-3'-phosphorothioate
  modified_base 22: mod_base = OTHER; note = 2'-O-methylguanosine-3'-phosphorothioate
  modified_base 23: mod_base = OTHER; note = 2'-O-methyladenosine
  misc_feature 1..4: note = RNA
  misc_feature 6..23: note = RNA
  misc_feature 5: note = DNA
aaagaagttcaggctggacctga

SEQ ID NO: 1165 - DNA, 23 bp, synthetic construct
  source 1..23: mol_type = other DNA
  modified_base 1: mod_base = OTHER; note = 2'-O-methyladenosine-3'-phosphorothioate
  modified_base 2: mod_base = OTHER; note = 2'-deoxy-2'-fluoroadenosine-3'-phosphorothioate
  modified_base 3: mod_base = OTHER; note = 2'-O-methyladenosine-3'-phosphate
  modified_base 4: mod_base = OTHER; note = 2'-O-methylcytidine-3'-phosphate
  modified_base 6: mod_base = OTHER; note = 2'-O-methylguanosine-3'-phosphate
  modified_base 7: mod_base = OTHER; note = guanosine-2'-phosphate
  modified_base 8: mod_base = OTHER; note = 2'-O-methylguanosine-3'-phosphate
  modified_base 9: mod_base = OTHER; note = 2'-O-methyladenosine-3'-phosphate
  modified_base 10: mod_base = OTHER; note = 2'-O-methyladenosine-3'-phosphate
  modified_base 11: mod_base = OTHER; note = 2'-O-methyladenosine-3'-phosphate
  modified_base 12: mod_base = OTHER; note = 2'-O-methylguanosine-3'-phosphate
  modified_base 13: mod_base = OTHER; note = 2'-O-methylguanosine-3'-phosphate
  modified_base 14: mod_base = OTHER; note = 2'-deoxy-2'-fluorouridine-3'-phosphate
  modified_base 15: mod_base = OTHER; note = 2'-O-methylguanosine-3'-phosphate
  modified_base 16: mod_base = OTHER; note = 2'-deoxy-2'-fluoroguanosine-3'-phosphate
  modified_base 17: mod_base = OTHER; note = 2'-O-methyladenosine-3'-phosphate
  modified_base 18: mod_base = OTHER; note = 2'-O-methylguanosine-3'-phosphate
  modified_base 19: mod_base = OTHER; note = 2'-O-methyladenosine-3'-phosphate
  modified_base 20: mod_base = OTHER; note = 2'-O-methylguanosine-3'-phosphate
  modified_base 21: mod_base = OTHER; note = 2'-O-methylcytidine-3'-phosphorothioate
  modified_base 22: mod_base = OTHER; note = 2'-O-methylcytidine-3'-phosphorothioate
  modified_base 23: mod_base = OTHER; note = 2'-O-methylcytidine
  misc_feature 1..4: note = RNA
  misc_feature 6..23: note = RNA
  misc_feature 5: note = DNA
aaactgggaaaggtggagagccc

SEQ ID NO: 1166 - DNA, 23 bp, synthetic construct
  source 1..23: mol_type = other DNA
  modified_base 1: mod_base = OTHER; note = 2'-O-methyladenosine-3'-phosphorothioate
  modified_base 2: mod_base = OTHER; note = 2'-deoxy-2'-fluorouridine-3'-phosphorothioate
  modified_base 3: mod_base = OTHER; note = 2'-O-methyluridine-3'-phosphate
  modified_base 4: mod_base = OTHER; note = 2'-O-methyluridine-3'-phosphate
  modified_base 6: mod_base = OTHER; note = 2'-O-methylguanosine-3'-phosphate
  modified_base 7: mod_base = OTHER; note = cytidine-2'-phosphate
  modified_base 8: mod_base = OTHER; note = 2'-O-methyladenosine-3'-phosphate
  modified_base 9: mod_base = OTHER; note = 2'-O-methylcytidine-3'-phosphate
  modified_base 10: mod_base = OTHER; note = 2'-O-methylcytidine-3'-phosphate
  modified_base 11: mod_base = OTHER; note = 2'-O-methyluridine-3'-phosphate
  modified_base 12: mod_base = OTHER; note = 2'-O-methylcytidine-3'-phosphate
  modified_base 13: mod_base = OTHER; note = 2'-O-methyluridine-3'-phosphate
  modified_base 14: mod_base = OTHER; note = 2'-deoxy-2'-fluoroguanosine-3'-phosphate
  modified_base 15: mod_base = OTHER; note = 2'-O-methyladenosine-3'-phosphate
  modified_base 16: mod_base = OTHER; note = 2'-deoxy-2'-fluoroadenosine-3'-phosphate
  modified_base 17: mod_base = OTHER; note = 2'-O-methyladenosine-3'-phosphate
  modified_base 18: mod_base = OTHER; note = 2'-O-methylguanosine-3'-phosphate
  modified_base 19: mod_base = OTHER; note = 2'-O-methyladenosine-3'-phosphate
  modified_base 20: mod_base = OTHER; note = 2'-O-methyladenosine-3'-phosphate
  modified_base 21: mod_base = OTHER; note = 2'-O-methyluridine-3'-phosphorothioate
  modified_base 22: mod_base = OTHER; note = 2'-O-methylcytidine-3'-phosphorothioate
  modified_base 23: mod_base = OTHER; note = 2'-O-methyluridine
  misc_feature 1..4: note = RNA
  misc_feature 6..23: note = RNA
  misc_feature 5: note = DNA
atttagcacctctgaaagaatct

SEQ ID NO: 1167 - DNA, 23 bp, synthetic construct
  source 1..23: mol_type = other DNA
  modified_base 1: mod_base = OTHER; note = 2'-O-methyladenosine-3'-phosphorothioate
  modified_base 2: mod_base = OTHER; note = 2'-deoxy-2'-fluorouridine-3'-phosphorothioate
  modified_base 3: mod_base = OTHER; note = 2'-O-methyladenosine-3'-phosphate
  modified_base 4: mod_base = OTHER; note = 2'-O-methylguanosine-3'-phosphate
  modified_base 6: mod_base = OTHER; note = 2'-O-methyluridine-3'-phosphate
  modified_base 7: mod_base = OTHER; note = guanosine-2'-phosphate
  modified_base 8: mod_base = OTHER; note = 2'-O-methylcytidine-3'-phosphate
  modified_base 9: mod_base = OTHER; note = 2'-O-methyladenosine-3'-phosphate
  modified_base 10: mod_base = OTHER; note = 2'-O-methylcytidine-3'-phosphate
  modified_base 11: mod_base = OTHER; note = 2'-O-methyladenosine-3'-phosphate
  modified_base 12: mod_base = OTHER; note = 2'-O-methyladenosine-3'-phosphate
  modified_base 13: mod_base = OTHER; note = 2'-O-methyladenosine-3'-phosphate
  modified_base 14: mod_base = OTHER; note = 2'-deoxy-2'-fluoroguanosine-3'-phosphate
  modified_base 15: mod_base = OTHER; note = 2'-O-methyladenosine-3'-phosphate
  modified_base 16: mod_base = OTHER; note = 2'-deoxy-2'-fluorouridine-3'-phosphate
  modified_base 17: mod_base = OTHER; note = 2'-O-methylguanosine-3'-phosphate
  modified_base 18: mod_base = OTHER; note = 2'-O-methylguanosine-3'-phosphate
  modified_base 19: mod_base = OTHER; note = 2'-O-methylguanosine-3'-phosphate
  modified_base 20: mod_base = OTHER; note = 2'-O-methyladenosine-3'-phosphate
  modified_base 21: mod_base = OTHER; note = 2'-O-methyladenosine-3'-phosphorothioate
  modified_base 22: mod_base = OTHER; note = 2'-O-methyladenosine-3'-phosphorothioate
  modified_base 23: mod_base = OTHER; note = 2'-O-methylcytidine
  misc_feature 1..4: note = RNA
  misc_feature 6..23: note = RNA
  misc_feature 5: note = DNA
atagctgcacaaagatgggaaac

SEQ ID NO: 1168 - DNA, 23 bp, synthetic construct
  source 1..23: mol_type = other DNA
  modified_base 1: mod_base = OTHER; note = 2'-O-methyladenosine-3'-phosphorothioate
  modified_base 2: mod_base = OTHER; note = 2'-deoxy-2'-fluoroadenosine-3'-phosphorothioate
  modified_base 3: mod_base = OTHER; note = 2'-O-methyladenosine-3'-phosphate
  modified_base 4: mod_base = OTHER; note = 2'-O-methyluridine-3'-phosphate
  modified_base 6: mod_base = OTHER; note = 2'-O-methylcytidine-3'-phosphate
  modified_base 7: mod_base = OTHER; note = guanosine-2'-phosphate
  modified_base 8: mod_base = OTHER; note = 2'-O-methylguanosine-3'-phosphate
  modified_base 9: mod_base = OTHER; note = 2'-O-methyladenosine-3'-phosphate
  modified_base 10: mod_base = OTHER; note = 2'-O-methylguanosine-3'-phosphate
  modified_base 11: mod_base = OTHER; note = 2'-O-methylguanosine-3'-phosphate
  modified_base 12: mod_base = OTHER; note = 2'-O-methyluridine-3'-phosphate
  modified_base 13: mod_base = OTHER; note = 2'-O-methyladenosine-3'-phosphate
  modified_base 14: mod_base = OTHER; note = 2'-deoxy-2'-fluoroguanosine-3'-phosphate
  modified_base 15: mod_base = OTHER; note = 2'-O-methylcytidine-3'-phosphate
  modified_base 16: mod_base = OTHER; note = 2'-deoxy-2'-fluorouridine-3'-phosphate
  modified_base 17: mod_base = OTHER; note = 2'-O-methylguanosine-3'-phosphate
  modified_base 18: mod_base = OTHER; note = 2'-O-methylcytidine-3'-phosphate
  modified_base 19: mod_base = OTHER; note = 2'-O-methyladenosine-3'-phosphate
  modified_base 20: mod_base = OTHER; note = 2'-O-methylcytidine-3'-phosphate
  modified_base 21: mod_base = OTHER; note = 2'-O-methyladenosine-3'-phosphorothioate
  modified_base 22: mod_base = OTHER; note = 2'-O-methyladenosine-3'-phosphorothioate
  modified_base 23: mod_base = OTHER; note = 2'-O-methyladenosine
  misc_feature 1..4: note = RNA
  misc_feature 6..23: note = RNA
  misc_feature 5: note = DNA
aaatgcggaggtagctgcacaaa

SEQ ID NO: 1169 - DNA, 23 bp, synthetic construct
  source 1..23: mol_type = other DNA
  modified_base 1: mod_base = OTHER; note = 2'-O-methyladenosine-3'-phosphorothioate
  modified_base 2: mod_base = OTHER; note = 2'-deoxy-2'-fluoroadenosine-3'-phosphorothioate
  modified_base 3: mod_base = OTHER; note = 2'-O-methylguanosine-3'-phosphate
  modified_base 4: mod_base = OTHER; note = 2'-O-methylguanosine-3'-phosphate
  modified_base 6: mod_base = OTHER; note = 2'-O-methyluridine-3'-phosphate
  modified_base 7: mod_base = OTHER; note = guanosine-2'-phosphate
  modified_base 8: mod_base = OTHER; note = 2'-O-methylguanosine-3'-phosphate
  modified_base 9: mod_base = OTHER; note = 2'-O-methylguanosine-3'-phosphate
  modified_base 10: mod_base = OTHER; note = 2'-O-methyladenosine-3'-phosphate
  modified_base 11: mod_base = OTHER; note = 2'-O-methyluridine-3'-phosphate
  modified_base 12: mod_base = OTHER; note = 2'-O-methylcytidine-3'-phosphate
  modified_base 13: mod_base = OTHER; note = 2'-O-methylcytidine-3'-phosphate
  modified_base 14: mod_base = OTHER; note = 2'-deoxy-2'-fluorouridine-3'-phosphate
  modified_base 15: mod_base = OTHER; note = 2'-O-methylcytidine-3'-phosphate
  modified_base 16: mod_base = OTHER; note = 2'-deoxy-2'-fluorocytidine-3'-phosphate
  modified_base 17: mod_base = OTHER; note = 2'-O-methyladenosine-3'-phosphate
  modified_base 18: mod_base = OTHER; note = 2'-O-methylcytidine-3'-phosphate
  modified_base 19: mod_base = OTHER; note = 2'-O-methylguanosine-3'-phosphate
  modified_base 20: mod_base = OTHER; note = 2'-O-methyluridine-3'-phosphate
  modified_base 21: mod_base = OTHER; note = 2'-O-methylcytidine-3'-phosphorothioate
  modified_base 22: mod_base = OTHER; note = 2'-O-methyladenosine-3'-phosphorothioate
  modified_base 23: mod_base = OTHER; note = 2'-O-methylcytidine
  misc_feature 1..4: note = RNA
  misc_feature 6..23: note = RNA
  misc_feature 5: note = DNA
aaggctgggatcctccacgtcac

SEQ ID NO: 1170 - DNA, 23 bp, synthetic construct
  source 1..23: mol_type = other DNA
  modified_base 1: mod_base = OTHER; note = 2'-O-methyladenosine-3'-phosphorothioate
  modified_base 2: mod_base = OTHER; note = 2'-deoxy-2'-fluorouridine-3'-phosphorothioate
  modified_base 3: mod_base = OTHER; note = 2'-O-methylcytidine-3'-phosphate
  modified_base 4: mod_base = OTHER; note = 2'-O-methyladenosine-3'-phosphate
  modified_base 6: mod_base = OTHER; note = 2'-O-methyladenosine-3'-phosphate
  modified_base 7: mod_base = OTHER; note = guanosine-2'-phosphate
  modified_base 8: mod_base = OTHER; note = 2'-O-methylguanosine-3'-phosphate
  modified_base 9: mod_base = OTHER; note = 2'-O-methylcytidine-3'-phosphate
  modified_base 10: mod_base = OTHER; note = 2'-O-methyluridine-3'-phosphate
  modified_base 11: mod_base = OTHER; note = 2'-O-methylguanosine-3'-phosphate
  modified_base 12: mod_base = OTHER; note = 2'-O-methylguanosine-3'-phosphate
  modified_base 13: mod_base = OTHER; note = 2'-O-methylguanosine-3'-phosphate
  modified_base 14: mod_base = OTHER; note = 2'-deoxy-2'-fluoroadenosine-3'-phosphate
  modified_base 15: mod_base = OTHER; note = 2'-O-methyluridine-3'-phosphate
  modified_base 16: mod_base = OTHER; note = 2'-deoxy-2'-fluorocytidine-3'-phosphate
  modified_base 17: mod_base = OTHER; note = 2'-O-methylcytidine-3'-phosphate
  modified_base 18: mod_base = OTHER; note = 2'-O-methyluridine-3'-phosphate
  modified_base 19: mod_base = OTHER; note = 2'-O-methylcytidine-3'-phosphate
  modified_base 20: mod_base = OTHER; note = 2'-O-methylcytidine-3'-phosphate
  modified_base 21: mod_base = OTHER; note = 2'-O-methyladenosine-3'-phosphorothioate
  modified_base 22: mod_base = OTHER; note = 2'-O-methylcytidine-3'-phosphorothioate
  modified_base 23: mod_base = OTHER; note = 2'-O-methylguanosine
  misc_feature 1..4: note = RNA
  misc_feature 6..23: note = RNA
  misc_feature 5: note = DNA
atcagaggctgggatcctccacg

SEQ ID NO: 1171 - DNA, 23 bp, synthetic construct
  source 1..23: mol_type = other DNA
  modified_base 1: mod_base = OTHER; note = 2'-O-methyladenosine-3'-phosphorothioate
  modified_base 2: mod_base = OTHER; note = 2'-deoxy-2'-fluoroadenosine-3'-phosphorothioate
  modified_base 3: mod_base = OTHER; note = 2'-O-methyladenosine-3'-phosphate
  modified_base 4: mod_base = OTHER; note = 2'-O-methyladenosine-3'-phosphate
  modified_base 6: mod_base = OTHER; note = 2'-O-methylcytidine-3'-phosphate
  modified_base 7: mod_base = OTHER; note = cytidine-2'-phosphate
  modified_base 8: mod_base = OTHER; note = 2'-O-methyladenosine-3'-phosphate
  modified_base 9: mod_base = OTHER; note = 2'-O-methyladenosine-3'-phosphate
  modified_base 10: mod_base = OTHER; note = 2'-O-methylcytidine-3'-phosphate
  modified_base 11: mod_base = OTHER; note = 2'-O-methyluridine-3'-phosphate
  modified_base 12: mod_base = OTHER; note = 2'-O-methylcytidine-3'-phosphate
  modified_base 13: mod_base = OTHER; note = 2'-O-methyladenosine-3'-phosphate
  modified_base 14: mod_base = OTHER; note = 2'-deoxy-2'-fluoroguanosine-3'-phosphate
  modified_base 15: mod_base = OTHER; note = 2'-O-methylcytidine-3'-phosphate
  modified_base 16: mod_base = OTHER; note = 2'-deoxy-2'-fluorouridine-3'-phosphate
  modified_base 17: mod_base = OTHER; note = 2'-O-methylcytidine-3'-phosphate
  modified_base 18: mod_base = OTHER; note = 2'-O-methyladenosine-3'-phosphate
  modified_base 19: mod_base = OTHER; note = 2'-O-methylguanosine-3'-phosphate
  modified_base 20: mod_base = OTHER; note = 2'-O-methyladenosine-3'-phosphate
  modified_base 21: mod_base = OTHER; note = 2'-O-methylguanosine-3'-phosphorothioate
  modified_base 22: mod_base = OTHER; note = 2'-O-methylguanosine-3'-phosphorothioate
  modified_base 23: mod_base = OTHER; note = 2'-O-methylcytidine
  misc_feature 1..4: note = RNA
  misc_feature 6..23: note = RNA
  misc_feature 5: note = DNA
aaaaaccaactcagctcagaggc

SEQ ID NO: 1172 - DNA, 23 bp, synthetic construct
  source 1..23: mol_type = other DNA
  modified_base 1: mod_base = OTHER; note = 2'-O-methyladenosine-3'-phosphorothioate
  modified_base 2: mod_base = OTHER; note = 2'-deoxy-2'-fluorocytidine-3'-phosphorothioate
  modified_base 3: mod_base = OTHER; note = 2'-O-methyluridine-3'-phosphate
  modified_base 4: mod_base = OTHER; note = 2'-O-methyluridine-3'-phosphate
  modified_base 6: mod_base = OTHER; note = 2'-O-methyluridine-3'-phosphate
  modified_base 7: mod_base = OTHER; note = cytidine-2'-phosphate
  modified_base 8: mod_base = OTHER; note = 2'-O-methyladenosine-3'-phosphate
  modified_base 9: mod_base = OTHER; note = 2'-O-methyluridine-3'-phosphate
  modified_base 10: mod_base = OTHER; note = 2'-O-methyladenosine-3'-phosphate
  modified_base 11: mod_base = OTHER; note = 2'-O-methyladenosine-3'-phosphate
  modified_base 12: mod_base = OTHER; note = 2'-O-methyladenosine-3'-phosphate
  modified_base 13: mod_base = OTHER; note = 2'-O-methyladenosine-3'-phosphate
  modified_base 14: mod_base = OTHER; note = 2'-deoxy-2'-fluorocytidine-3'-phosphate
  modified_base 15: mod_base = OTHER; note = 2'-O-methylcytidine-3'-phosphate
  modified_base 16: mod_base = OTHER; note = 2'-deoxy-2'-fluoroadenosine-3'-phosphate
  modified_base 17: mod_base = OTHER; note = 2'-O-methyladenosine-3'-phosphate
  modified_base 18: mod_base = OTHER; note = 2'-O-methylcytidine-3'-phosphate
  modified_base 19: mod_base = OTHER; note = 2'-O-methyluridine-3'-phosphate
  modified_base 20: mod_base = OTHER; note = 2'-O-methylcytidine-3'-phosphate
  modified_base 21: mod_base = OTHER; note = 2'-O-methyladenosine-3'-phosphorothioate
  modified_base 22: mod_base = OTHER; note = 2'-O-methylguanosine-3'-phosphorothioate
  modified_base 23: mod_base = OTHER; note = 2'-O-methylcytidine
  misc_feature 1..4: note = RNA
  misc_feature 6..23: note = RNA
  misc_feature 5: note = DNA
acttttcataaaaccaactcagc

SEQ ID NO: 1173 - DNA, 23 bp, synthetic construct
  source 1..23: mol_type = other DNA
  modified_base 1: mod_base = OTHER; note = 2'-O-methyladenosine-3'-phosphorothioate
  modified_base 2: mod_base = OTHER; note = 2'-deoxy-2'-fluorouridine-3'-phosphorothioate
  modified_base 3: mod_base = OTHER; note = 2'-O-methylcytidine-3'-phosphate
  modified_base 4: mod_base = OTHER; note = 2'-O-methylcytidine-3'-phosphate
  modified_base 6: mod_base = OTHER; note = 2'-O-methyladenosine-3'-phosphate
  modified_base 7: mod_base = OTHER; note = guanosine-2'-phosphate
  modified_base 8: mod_base = OTHER; note = 2'-O-methylcytidine-3'-phosphate
  modified_base 9: mod_base = OTHER; note = 2'-O-methyluridine-3'-phosphate
  modified_base 10: mod_base = OTHER; note = 2'-O-methyluridine-3'-phosphate
  modified_base 11: mod_base = OTHER; note = 2'-O-methyluridine-3'-phosphate
  modified_base 12: mod_base = OTHER; note = 2'-O-methyluridine-3'-phosphate
  modified_base 13: mod_base = OTHER; note = 2'-O-methylcytidine-3'-phosphate
  modified_base 14: mod_base = OTHER; note = 2'-deoxy-2'-fluoroadenosine-3'-phosphate
  modified_base 15: mod_base = OTHER; note = 2'-O-methyluridine-3'-phosphate
  modified_base 16: mod_base = OTHER; note = 2'-deoxy-2'-fluoroadenosine-3'-phosphate
  modified_base 17: mod_base = OTHER; note = 2'-O-methyladenosine-3'-phosphate
  modified_base 18: mod_base = OTHER; note = 2'-O-methyladenosine-3'-phosphate
  modified_base 19: mod_base = OTHER; note = 2'-O-methyladenosine-3'-phosphate
  modified_base 20: mod_base = OTHER; note = 2'-O-methylcytidine-3'-phosphate
  modified_base 21: mod_base = OTHER; note = 2'-O-methylcytidine-3'-phosphorothioate
  modified_base 22: mod_base = OTHER; note = 2'-O-methyladenosine-3'-phosphorothioate
  modified_base 23: mod_base = OTHER; note = 2'-O-methyladenosine
  misc_feature 1..4: note = RNA
  misc_feature 6..23: note = RNA
  misc_feature 5: note = DNA
atcctagcttttcataaaaccaa

SEQ ID NO: 1174 - DNA, 23 bp, synthetic construct
  source 1..23: mol_type = other DNA
  modified_base 1: mod_base = OTHER; note = 2'-O-methyladenosine-3'-phosphorothioate
  modified_base 2: mod_base = OTHER; note = 2'-deoxy-2'-fluoroguanosine-3'-phosphorothioate
  modified_base 3: mod_base = OTHER; note = 2'-O-methylcytidine-3'-phosphate
  modified_base 4: mod_base = OTHER; note = 2'-O-methyluridine-3'-phosphate
  modified_base 6: mod_base = OTHER; note = 2'-O-methylcytidine-3'-phosphate
  modified_base 7: mod_base = OTHER; note = cytidine-2'-phosphate
  modified_base 8: mod_base = OTHER; note = 2'-O-methyluridine-3'-phosphate
  modified_base 9: mod_base = OTHER; note = 2'-O-methyladenosine-3'-phosphate
  modified_base 10: mod_base = OTHER; note = 2'-O-methylguanosine-3'-phosphate
  modified_base 11: mod_base = OTHER; note = 2'-O-methylcytidine-3'-phosphate
  modified_base 12: mod_base = OTHER; note = 2'-O-methyluridine-3'-phosphate
  modified_base 13: mod_base = OTHER; note = 2'-O-methyluridine-3'-phosphate
  modified_base 14: mod_base = OTHER; note = 2'-deoxy-2'-fluorouridine-3'-phosphate
  modified_base 15: mod_base = OTHER; note = 2'-O-methyluridine-3'-phosphate
  modified_base 16: mod_base = OTHER; note = 2'-deoxy-2'-fluorocytidine-3'-phosphate
  modified_base 17: mod_base = OTHER; note = 2'-O-methyladenosine-3'-phosphate
  modified_base 18: mod_base = OTHER; note = 2'-O-methyluridine-3'-phosphate
  modified_base 19: mod_base = OTHER; note = 2'-O-methyladenosine-3'-phosphate
  modified_base 20: mod_base = OTHER; note = 2'-O-methyladenosine-3'-phosphate
  modified_base 21: mod_base = OTHER; note = 2'-O-methyladenosine-3'-phosphorothioate
  modified_base 22: mod_base = OTHER; note = 2'-O-methyladenosine-3'-phosphorothioate
  modified_base 23: mod_base = OTHER; note = 2'-O-methylcytidine
  misc_feature 1..4: note = RNA
  misc_feature 6..23: note = RNA
  misc_feature 5: note = DNA
agcttcctagcttttcataaaac

SEQ ID NO: 1175 - DNA, 23 bp, synthetic construct
  source 1..23: mol_type = other DNA
  modified_base 1: mod_base = OTHER; note = 2'-O-methyladenosine-3'-phosphorothioate
  modified_base 2: mod_base = OTHER; note = 2'-deoxy-2'-fluorouridine-3'-phosphorothioate
  modified_base 3: mod_base = OTHER; note = 2'-O-methylguanosine-3'-phosphate
  modified_base 4: mod_base = OTHER; note = 2'-O-methylcytidine-3'-phosphate
  modified_base 6: mod_base = OTHER; note = 2'-O-methyluridine-3'-phosphate
  modified_base 7: mod_base = OTHER; note = cytidine-2'-phosphate
  modified_base 8: mod_base = OTHER; note = 2'-O-methylcytidine-3'-phosphate
  modified_base 9: mod_base = OTHER; note = 2'-O-methyluridine-3'-phosphate
  modified_base 10: mod_base = OTHER; note = 2'-O-methyladenosine-3'-phosphate
  modified_base 11: mod_base = OTHER; note = 2'-O-methylguanosine-3'-phosphate
  modified_base 12: mod_base = OTHER; note = 2'-O-methylcytidine-3'-phosphate
  modified_base 13: mod_base = OTHER; note = 2'-O-methyluridine-3'-phosphate
  modified_base 14: mod_base = OTHER; note = 2'-deoxy-2'-fluorouridine-3'-phosphate
  modified_base 15: mod_base = OTHER; note = 2'-O-methyluridine-3'-phosphate
  modified_base 16: mod_base = OTHER; note = 2'-deoxy-2'-fluorouridine-3'-phosphate
  modified_base 17: mod_base = OTHER; note = 2'-O-methylcytidine-3'-phosphate
  modified_base 18: mod_base = OTHER; note = 2'-O-methyladenosine-3'-phosphate
  modified_base 19: mod_base = OTHER; note = 2'-O-methyluridine-3'-phosphate
  modified_base 20: mod_base = OTHER; note = 2'-O-methyladenosine-3'-phosphate
  modified_base 21: mod_base = OTHER; note = 2'-O-methyladenosine-3'-phosphorothioate
  modified_base 22: mod_base = OTHER; note = 2'-O-methyladenosine-3'-phosphorothioate
  modified_base 23: mod_base = OTHER; note = 2'-O-methyladenosine
  misc_feature 1..4: note = RNA
  misc_feature 6..23: note = RNA
  misc_feature 5: note = DNA
atgcttcctagcttttcataaaa

SEQ ID NO: 1176 - DNA, 23 bp, synthetic construct
  source 1..23: mol_type = other DNA
  modified_base 1: mod_base = OTHER; note = 2'-O-methyladenosine-3'-phosphorothioate
  modified_base 2: mod_base = OTHER; note = 2'-deoxy-2'-fluoroadenosine-3'-phosphorothioate
  modified_base 3: mod_base = OTHER; note = 2'-O-methyluridine-3'-phosphate
  modified_base 4: mod_base = OTHER; note = 2'-O-methyluridine-3'-phosphate
  modified_base 6: mod_base = OTHER; note = 2'-O-methylcytidine-3'-phosphate
  modified_base 7: mod_base = OTHER; note = cytidine-2'-phosphate
  modified_base 8: mod_base = OTHER; note = 2'-O-methylcytidine-3'-phosphate
  modified_base 9: mod_base = OTHER; note = 2'-O-methyladenosine-3'-phosphate
  modified_base 10: mod_base = OTHER; note = 2'-O-methyladenosine-3'-phosphate
  modified_base 11: mod_base = OTHER; note = 2'-O-methylcytidine-3'-phosphate
  modified_base 12: mod_base = OTHER; note = 2'-O-methylcytidine-3'-phosphate
  modified_base 13: mod_base = OTHER; note = 2'-O-methyladenosine-3'-phosphate
  modified_base 14: mod_base = OTHER; note = 2'-deoxy-2'-fluoroguanosine-3'-phosphate
  modified_base 15: mod_base = OTHER; note = 2'-O-methylcytidine-3'-phosphate
  modified_base 16: mod_base = OTHER; note = 2'-deoxy-2'-fluorouridine-3'-phosphate
  modified_base 17: mod_base = OTHER; note = 2'-O-methylguanosine-3'-phosphate
  modified_base 18: mod_base = OTHER; note = 2'-O-methyladenosine-3'-phosphate
  modified_base 19: mod_base = OTHER; note = 2'-O-methyladenosine-3'-phosphate
  modified_base 20: mod_base = OTHER; note = 2'-O-methyluridine-3'-phosphate
  modified_base 21: mod_base = OTHER; note = 2'-O-methyluridine-3'-phosphorothioate
  modified_base 22: mod_base = OTHER; note = 2'-O-methyladenosine-3'-phosphorothioate
  modified_base 23: mod_base = OTHER; note = 2'-O-methyladenosine
  misc_feature 1..4: note = RNA
  misc_feature 6..23: note = RNA
  misc_feature 5: note = DNA
aatttcccaaccagctgaattaa

SEQ ID NO: 1177 - DNA, 23 bp, synthetic construct
  source 1..23: mol_type = other DNA
  modified_base 1: mod_base = OTHER; note = 2'-O-methyladenosine-3'-phosphorothioate
  modified_base 2: mod_base = OTHER; note = 2'-deoxy-2'-fluoroadenosine-3'-phosphorothioate
  modified_base 3: mod_base = OTHER; note = 2'-O-methylguanosine-3'-phosphate
  modified_base 4: mod_base = OTHER; note = 2'-O-methyluridine-3'-phosphate
  modified_base 6: mod_base = OTHER; note = 2'-O-methyladenosine-3'-phosphate
  modified_base 7: mod_base = OTHER; note = guanosine-2'-phosphate
  modified_base 8: mod_base = OTHER; note = 2'-O-methyluridine-3'-phosphate
  modified_base 9: mod_base = OTHER; note = 2'-O-methyladenosine-3'-phosphate
  modified_base 10: mod_base = OTHER; note = 2'-O-methyladenosine-3'-phosphate
  modified_base 11: mod_base = OTHER; note = 2'-O-methylguanosine-3'-phosphate
  modified_base 12: mod_base = OTHER; note = 2'-O-methylguanosine-3'-phosphate
  modified_base 13: mod_base = OTHER; note = 2'-O-methylguanosine-3'-phosphate
  modified_base 14: mod_base = OTHER; note = 2'-deoxy-2'-fluoroadenosine-3'-phosphate
  modified_base 15: mod_base = OTHER; note = 2'-O-methylcytidine-3'-phosphate
  modified_base 16: mod_base = OTHER; note = 2'-deoxy-2'-fluorocytidine-3'-phosphate
  modified_base 17: mod_base = OTHER; note = 2'-O-methylcytidine-3'-phosphate
  modified_base 18: mod_base = OTHER; note = 2'-O-methyluridine-3'-phosphate
  modified_base 19: mod_base = OTHER; note = 2'-O-methylcytidine-3'-phosphate
  modified_base 20: mod_base = OTHER; note = 2'-O-methyluridine-3'-phosphate
  modified_base 21: mod_base = OTHER; note = 2'-O-methylguanosine-3'-phosphorothioate
  modified_base 22: mod_base = OTHER; note = 2'-O-methylcytidine-3'-phosphorothioate
  modified_base 23: mod_base = OTHER; note = 2'-O-methyladenosine
  misc_feature 1..4: note = RNA
  misc_feature 6..23: note = RNA
  misc_feature 5: note = DNA
aagtcagtaagggaccctctgca

SEQ ID NO: 1178 - DNA, 23 bp, synthetic construct
  source 1..23: mol_type = other DNA
  modified_base 1: mod_base = OTHER; note = 2'-O-methyladenosine-3'-phosphorothioate
  modified_base 2: mod_base = OTHER; note = 2'-deoxy-2'-fluoroguanosine-3'-phosphorothioate
  modified_base 3: mod_base = OTHER; note = 2'-O-methyladenosine-3'-phosphate
  modified_base 4: mod_base = OTHER; note = 2'-O-methyladenosine-3'-phosphate
  modified_base 6: mod_base = OTHER; note = 2'-O-methyladenosine-3'-phosphate
  modified_base 7: mod_base = OTHER; note = guanosine-2'-phosphate
  modified_base 8: mod_base = OTHER; note = 2'-O-methyluridine-3'-phosphate
  modified_base 9: mod_base = OTHER; note = 2'-O-methylcytidine-3'-phosphate
  modified_base 10: mod_base = OTHER; note = 2'-O-methyluridine-3'-phosphate
  modified_base 11: mod_base = OTHER; note = 2'-O-methylguanosine-3'-phosphate
  modified_base 12: mod_base = OTHER; note = 2'-O-methyladenosine-3'-phosphate
  modified_base 13: mod_base = OTHER; note = 2'-O-methylcytidine-3'-phosphate
  modified_base 14: mod_base = OTHER; note = 2'-deoxy-2'-fluorocytidine-3'-phosphate
  modified_base 15: mod_base = OTHER; note = 2'-O-methyladenosine-3'-phosphate
  modified_base 16: mod_base = OTHER; note = 2'-deoxy-2'-fluorouridine-3'-phosphate
  modified_base 17: mod_base = OTHER; note = 2'-O-methyluridine-3'-phosphate
  modified_base 18: mod_base = OTHER; note = 2'-O-methyladenosine-3'-phosphate
  modified_base 19: mod_base = OTHER; note = 2'-O-methyladenosine-3'-phosphate
  modified_base 20: mod_base = OTHER; note = 2'-O-methyluridine-3'-phosphate
  modified_base 21: mod_base = OTHER; note = 2'-O-methyladenosine-3'-phosphorothioate
  modified_base 22: mod_base = OTHER; note = 2'-O-methylguanosine-3'-phosphorothioate
  modified_base 23: mod_base = OTHER; note = 2'-O-methylguanosine
  misc_feature 1..4: note = RNA
  misc_feature 6..23: note = RNA
  misc_feature 5: note = DNA
agaacagtctgaccattaatagg

SEQ ID NO: 1179 - DNA, 23 bp, synthetic construct
  source 1..23: mol_type = other DNA
  modified_base 1: mod_base = OTHER; note = 2'-O-methyladenosine-3'-phosphorothioate
  modified_base 2: mod_base = OTHER; note = 2'-deoxy-2'-fluoroadenosine-3'-phosphorothioate
  modified_base 3: mod_base = OTHER; note = 2'-O-methylguanosine-3'-phosphate
  modified_base 4: mod_base = OTHER; note = 2'-O-methyluridine-3'-phosphate
  modified_base 6: mod_base = OTHER; note = 2'-O-methyladenosine-3'-phosphate
  modified_base 7: mod_base = OTHER; note = guanosine-2'-phosphate
  modified_base 8: mod_base = OTHER; note = 2'-O-methylguanosine-3'-phosphate
  modified_base 9: mod_base = OTHER; note = 2'-O-methyluridine-3'-phosphate
  modified_base 10: mod_base = OTHER; note = 2'-O-methylguanosine-3'-phosphate
  modified_base 11: mod_base = OTHER; note = 2'-O-methyladenosine-3'-phosphate
  modified_base 12: mod_base = OTHER; note = 2'-O-methyladenosine-3'-phosphate
  modified_base 13: mod_base = OTHER; note = 2'-O-methyladenosine-3'-phosphate
  modified_base 14: mod_base = OTHER; note = 2'-deoxy-2'-fluoroadenosine-3'-phosphate
  modified_base 15: mod_base = OTHER; note = 2'-O-methyladenosine-3'-phosphate
  modified_base 16: mod_base = OTHER; note = 2'-deoxy-2'-fluoroguanosine-3'-phosphate
  modified_base 17: mod_base = OTHER; note = 2'-O-methylguanosine-3'-phosphate
  modified_base 18: mod_base = OTHER; note = 2'-O-methyluridine-3'-phosphate
  modified_base 19: mod_base = OTHER; note = 2'-O-methylguanosine-3'-phosphate
  modified_base 20: mod_base = OTHER; note = 2'-O-methyluridine-3'-phosphate
  modified_base 21: mod_base = OTHER; note = 2'-O-methyluridine-3'-phosphorothioate
  modified_base 22: mod_base = OTHER; note = 2'-O-methylcytidine-3'-phosphorothioate
  modified_base 23: mod_base = OTHER; note = 2'-O-methyluridine
  misc_feature 1..4: note = RNA
  misc_feature 6..23: note = RNA
  misc_feature 5: note = DNA
aagttaggtgaaaaaggtgttct

SEQ ID NO: 1180 - DNA, 23 bp, synthetic construct
  source 1..23: mol_type = other DNA
  modified_base 1: mod_base = OTHER; note = 2'-O-methyladenosine-3'-phosphorothioate
  modified_base 2: mod_base = OTHER; note = 2'-deoxy-2'-fluorouridine-3'-phosphorothioate
  modified_base 3: mod_base = OTHER; note = 2'-O-methyluridine-3'-phosphate
  modified_base 4: mod_base = OTHER; note = 2'-O-methyluridine-3'-phosphate
  modified_base 6: mod_base = OTHER; note = 2'-O-methyladenosine-3'-phosphate
  modified_base 7: mod_base = OTHER; note = guanosine-2'-phosphate
  modified_base 8: mod_base = OTHER; note = 2'-O-methyluridine-3'-phosphate
  modified_base 9: mod_base = OTHER; note = 2'-O-methyluridine-3'-phosphate
  modified_base 10: mod_base = OTHER; note = 2'-O-methyladenosine-3'-phosphate
  modified_base 11: mod_base = OTHER; note = 2'-O-methylguanosine-3'-phosphate
  modified_base 12: mod_base = OTHER; note = 2'-O-methylguanosine-3'-phosphate
  modified_base 13: mod_base = OTHER; note = 2'-O-methyluridine-3'-phosphate
  modified_base 14: mod_base = OTHER; note = 2'-deoxy-2'-fluoroguanosine-3'-phosphate
  modified_base 15: mod_base = OTHER; note = 2'-O-methyladenosine-3'-phosphate
  modified_base 16: mod_base = OTHER; note = 2'-deoxy-2'-fluoroadenosine-3'-phosphate
  modified_base 17: mod_base = OTHER; note = 2'-O-methyladenosine-3'-phosphate
  modified_base 18: mod_base = OTHER; note = 2'-O-methyladenosine-3'-phosphate
  modified_base 19: mod_base = OTHER; note = 2'-O-methyladenosine-3'-phosphate
  modified_base 20: mod_base = OTHER; note = 2'-O-methylguanosine-3'-phosphate
  modified_base 21: mod_base = OTHER; note = 2'-O-methylguanosine-3'-phosphorothioate
  modified_base 22: mod_base = OTHER; note = 2'-O-methyluridine-3'-phosphorothioate
  modified_base 23: mod_base = OTHER; note = 2'-O-methylguanosine
  misc_feature 1..4: note = RNA
  misc_feature 6..23: note = RNA
  misc_feature 5: note = DNA
attttagttaggtgaaaaaggtg

SEQ ID NO: 1181 - DNA, 23 bp, synthetic construct
  source 1..23: mol_type = other DNA
  modified_base 1: mod_base = OTHER; note = 2'-O-methyladenosine-3'-phosphorothioate
  modified_base 2: mod_base = OTHER; note = 2'-deoxy-2'-fluorouridine-3'-phosphorothioate
  modified_base 3: mod_base = OTHER; note = 2'-O-methyladenosine-3'-phosphate
  modified_base 4: mod_base = OTHER; note = 2'-O-methyladenosine-3'-phosphate
  modified_base 6: mod_base = OTHER; note = 2'-O-methyladenosine-3'-phosphate
  modified_base 7: mod_base = OTHER; note = cytidine-2'-phosphate
  modified_base 8: mod_base = OTHER; note = 2'-O-methyladenosine-3'-phosphate
  modified_base 9: mod_base = OTHER; note = 2'-O-methyladenosine-3'-phosphate
  modified_base 10: mod_base = OTHER; note = 2'-O-methyladenosine-3'-phosphate
  modified_base 11: mod_base = OTHER; note = 2'-O-methyladenosine-3'-phosphate
  modified_base 12: mod_base = OTHER; note = 2'-O-methyluridine-3'-phosphate
  modified_base 13: mod_base = OTHER; note = 2'-O-methyluridine-3'-phosphate
  modified_base 14: mod_base = OTHER; note = 2'-deoxy-2'-fluorocytidine-3'-phosphate
  modified_base 15: mod_base = OTHER; note = 2'-O-methyladenosine-3'-phosphate
  modified_base 16: mod_base = OTHER; note = 2'-deoxy-2'-fluoroadenosine-3'-phosphate
  modified_base 17: mod_base = OTHER; note = 2'-O-methylcytidine-3'-phosphate
  modified_base 18: mod_base = OTHER; note = 2'-O-methyladenosine-3'-phosphate
  modified_base 19: mod_base = OTHER; note = 2'-O-methylguanosine-3'-phosphate
  modified_base 20: mod_base = OTHER; note = 2'-O-methylguanosine-3'-phosphate
  modified_base 21: mod_base = OTHER; note = 2'-O-methyluridine-3'-phosphorothioate
  modified_base 22: mod_base = OTHER; note = 2'-O-methyladenosine-3'-phosphorothioate
  modified_base 23: mod_base = OTHER; note = 2'-O-methyladenosine
  misc_feature 1..4: note = RNA
  misc_feature 6..23: note = RNA
  misc_feature 5: note = DNA
ataatacaaaattcaacaggtaa

SEQ ID NO: 1182 - RNA, 23 nt, synthetic construct
  source 1..23: mol_type = other RNA
agcgcggctggagcttgtccttc

SEQ ID NO: 1183 - RNA, 23 nt, synthetic construct
  source 1..23: mol_type = other RNA
ctgcggcttcctgggcttctacc

SEQ ID NO: 1184 - RNA, 23 nt, synthetic construct
  source 1..23: mol_type = other RNA
tgcggcttcctgggcttctacca

SEQ ID NO: 1185 - RNA, 23 nt, synthetic construct
  source 1..23: mol_type = other RNA
ggcttcctgggcttctaccacgt

SEQ ID NO: 1186 - RNA, 23 nt, synthetic construct
  source 1..23: mol_type = other RNA
ttcctgggcttctaccacgtcgg

SEQ ID NO: 1187 - RNA, 23 nt, synthetic construct
  source 1..23: mol_type = other RNA
tcctgggcttctaccacgtcggg

SEQ ID NO: 1188 - RNA, 23 nt, synthetic construct
  source 1..23: mol_type = other RNA
tccgcgacgcgcgcatgttgttc

SEQ ID NO: 1189 - RNA, 23 nt, synthetic construct
  source 1..23: mol_type = other RNA
tcccgctggagcagactctgcag

SEQ ID NO: 1190 - RNA, 23 nt, synthetic construct
  source 1..23: mol_type = other RNA
ctggagcagactctgcaggtcct

SEQ ID NO: 1191 - RNA, 23 nt, synthetic construct
  source 1..23: mol_type = other RNA
cagactctgcaggtcctctcaga

SEQ ID NO: 1192 - RNA, 23 nt, synthetic construct
  source 1..23: mol_type = other RNA
gactctgcaggtcctctcagatc

SEQ ID NO: 1193 - RNA, 23 nt, synthetic construct
  source 1..23: mol_type = other RNA
ctctgcaggtcctctcagatctt

SEQ ID NO: 1194 - RNA, 23 nt, synthetic construct
  source 1..23: mol_type = other RNA
tctgcaggtcctctcagatcttg

SEQ ID NO: 1195 - RNA, 23 nt, synthetic construct
  source 1..23: mol_type = other RNA
ctgcaggtcctctcagatcttgt

SEQ ID NO: 1196 - RNA, 23 nt, synthetic construct
  source 1..23: mol_type = other RNA
gaaggccaggagtcggaacattg

SEQ ID NO: 1197 - RNA, 23 nt, synthetic construct
  source 1..23: mol_type = other RNA
aaggccaggagtcggaacattgg

SEQ ID NO: 1198 - RNA, 23 nt, synthetic construct
  source 1..23: mol_type = other RNA
aggccaggagtcggaacattggc

SEQ ID NO: 1199 - RNA, 23 nt, synthetic construct
  source 1..23: mol_type = other RNA
tggcatcttccatccatccttca

SEQ ID NO: 1200 - RNA, 23 nt, synthetic construct
  source 1..23: mol_type = other RNA
aatgcctcccggccaatgtccac

SEQ ID NO: 1201 - RNA, 23 nt, synthetic construct
  source 1..23: mol_type = other RNA
gccaatgtccaccagctcatctc

SEQ ID NO: 1202 - RNA, 23 nt, synthetic construct
  source 1..23: mol_type = other RNA
ccaatgtccaccagctcatctcc

SEQ ID NO: 1203 - RNA, 23 nt, synthetic construct
  source 1..23: mol_type = other RNA
cggtccaaagacgaagtcgtgga

SEQ ID NO: 1204 - RNA, 23 nt, synthetic construct
  source 1..23: mol_type = other RNA
ggtccaaagacgaagtcgtggat

SEQ ID NO: 1205 - RNA, 23 nt, synthetic construct
  source 1..23: mol_type = other RNA
gtccaaagacgaagtcgtggatg

SEQ ID NO: 1206 - RNA, 23 nt, synthetic construct
  source 1..23: mol_type = other RNA
tccaaagacgaagtcgtggatgc

SEQ ID NO: 1207 - RNA, 23 nt, synthetic construct
  source 1..23: mol_type = other RNA
aaagacgaagtcgtggatgcctt

SEQ ID NO: 1208 - RNA, 23 nt, synthetic construct
  source 1..23: mol_type = other RNA
cccttctacagtggccttatccc

SEQ ID NO: 1209 - RNA, 23 nt, synthetic construct
  source 1..23: mol_type = other RNA
ccttctacagtggccttatccct

SEQ ID NO: 1210 - RNA, 23 nt, synthetic construct
  source 1..23: mol_type = other RNA
cttctacagtggccttatccctc

SEQ ID NO: 1211 - RNA, 23 nt, synthetic construct
  source 1..23: mol_type = other RNA
ttctacagtggccttatccctcc

SEQ ID NO: 1212 - RNA, 23 nt, synthetic construct
  source 1..23: mol_type = other RNA
acagtggccttatccctccttcc

SEQ ID NO: 1213 - RNA, 23 nt, synthetic construct
  source 1..23: mol_type = other RNA
agtggccttatccctccttcctt

SEQ ID NO: 1214 - RNA, 23 nt, synthetic construct
  source 1..23: mol_type = other RNA
gccttatccctccttccttcaga

SEQ ID NO: 1215 - RNA, 23 nt, synthetic construct
  source 1..23: mol_type = other RNA
ccttatccctccttccttcagag

SEQ ID NO: 1216 - RNA, 23 nt, synthetic construct
  source 1..23: mol_type = other RNA
atccctccttccttcagaggcgt

SEQ ID NO: 1217 - RNA, 23 nt, synthetic construct
  source 1..23: mol_type = other RNA
tccctccttccttcagaggcgtg

SEQ ID NO: 1218 - RNA, 23 nt, synthetic construct
  source 1..23: mol_type = other RNA
ctccttccttcagaggcgtgcga

SEQ ID NO: 1219 - RNA, 23 nt, synthetic construct
  source 1..23: mol_type = other RNA
cttccttcagaggcgtgcgatat

SEQ ID NO: 1220 - RNA, 23 nt, synthetic construct
  source 1..23: mol_type = other RNA
tccttcagaggcgtgcgatatgt

SEQ ID NO: 1221 - RNA, 23 nt, synthetic construct
  source 1..23: mol_type = other RNA
ccttcagaggcgtgcgatatgtg

SEQ ID NO: 1222 - RNA, 23 nt, synthetic construct
  source 1..23: mol_type = other RNA
cttcagaggcgtgcgatatgtgg

SEQ ID NO: 1223 - RNA, 23 nt, synthetic construct
  source 1..23: mol_type = other RNA
ttcagaggcgtgcgatatgtgga

SEQ ID NO: 1224 - RNA, 23 nt, synthetic construct
  source 1..23: mol_type = other RNA
tcagaggcgtgcgatatgtggat

SEQ ID NO: 1225 - RNA, 23 nt, synthetic construct
  source 1..23: mol_type = other RNA
agaggcgtgcgatatgtggatgg

SEQ ID NO: 1226 - RNA, 23 nt, synthetic construct
  source 1..23: mol_type = other RNA
gaggcgtgcgatatgtggatgga

SEQ ID NO: 1227 - RNA, 23 nt, synthetic construct
  source 1..23: mol_type = other RNA
ggcgtgcgatatgtggatggagg

SEQ ID NO: 1228 - RNA, 23 nt, synthetic construct
  source 1..23: mol_type = other RNA
gcgtgcgatatgtggatggagga

SEQ ID NO: 1229 - RNA, 23 nt, synthetic construct
  source 1..23: mol_type = other RNA
gagtgagtgacaacgtacccttc

SEQ ID NO: 1230 - RNA, 23 nt, synthetic construct
  source 1..23: mol_type = other RNA
tgagtgacaacgtacccttcatt

SEQ ID NO: 1231 - RNA, 23 nt, synthetic construct
  source 1..23: mol_type = other RNA
gagtgacaacgtacccttcattg

SEQ ID NO: 1232 - RNA, 23 nt, synthetic construct
  source 1..23: mol_type = other RNA
agtgacaacgtacccttcattga

SEQ ID NO: 1233 - RNA, 23 nt, synthetic construct
  source 1..23: mol_type = other RNA
gtgacaacgtacccttcattgat

SEQ ID NO: 1234 - RNA, 23 nt, synthetic construct
  source 1..23: mol_type = other RNA
tgacaacgtacccttcattgatg

SEQ ID NO: 1235 - RNA, 23 nt, synthetic construct
  source 1..23: mol_type = other RNA
gacaacgtacccttcattgatgc

SEQ ID NO: 1236 - RNA, 23 nt, synthetic construct
  source 1..23: mol_type = other RNA
acaacgtacccttcattgatgcc

SEQ ID NO: 1237 - RNA, 23 nt, synthetic construct
  source 1..23: mol_type = other RNA
aacgtacccttcattgatgccaa

SEQ ID NO: 1238 - RNA, 23 nt, synthetic construct
  source 1..23: mol_type = other RNA
acgtacccttcattgatgccaaa

SEQ ID NO: 1239 - RNA, 23 nt, synthetic construct
  source 1..23: mol_type = other RNA
agtacgacatctgccctaaagtc

SEQ ID NO: 1240 - RNA, 23 nt, synthetic construct
  source 1..23: mol_type = other RNA
tacgacatctgccctaaagtcaa

SEQ ID NO: 1241 - RNA, 23 nt, synthetic construct
  source 1..23: mol_type = other RNA
acgacatctgccctaaagtcaag

SEQ ID NO: 1242 - RNA, 23 nt, synthetic construct
  source 1..23: mol_type = other RNA
cgacatctgccctaaagtcaagt

SEQ ID NO: 1243 - RNA, 23 nt, synthetic construct
  source 1..23: mol_type = other RNA
catctgccctaaagtcaagtcca

SEQ ID NO: 1244 - RNA, 23 nt, synthetic construct
  source 1..23: mol_type = other RNA
atctgccctaaagtcaagtccac

SEQ ID NO: 1245 - RNA, 23 nt, synthetic construct
  source 1..23: mol_type = other RNA
tcatgtggacatcaccaagctca

SEQ ID NO: 1246 - RNA, 23 nt, synthetic construct
  source 1..23: mol_type = other RNA
catgtggacatcaccaagctcag

SEQ ID NO: 1247 - RNA, 23 nt, synthetic construct
  source 1..23: mol_type = other RNA
cagtctacgcctctgcacaggga

SEQ ID NO: 1248 - RNA, 23 nt, synthetic construct
  source 1..23: mol_type = other RNA
cgcctctgcacagggaacctcta

SEQ ID NO: 1249 - RNA, 23 nt, synthetic construct
  source 1..23: mol_type = other RNA
tctgcacagggaacctctacctt

SEQ ID NO: 1250 - RNA, 23 nt, synthetic construct
  source 1..23: mol_type = other RNA
ctgcacagggaacctctaccttc

SEQ ID NO: 1251 - RNA, 23 nt, synthetic construct
  source 1..23: mol_type = other RNA
tgcacagggaacctctaccttct

SEQ ID NO: 1252 - RNA, 23 nt, synthetic construct
  source 1..23: mol_type = other RNA
cacagggaacctctaccttctct

SEQ ID NO: 1253 - RNA, 23 nt, synthetic construct
  source 1..23: mol_type = other RNA
acagggaacctctaccttctctc

SEQ ID NO: 1254 - RNA, 23 nt, synthetic construct
  source 1..23: mol_type = other RNA
cagggaacctctaccttctctcg

SEQ ID NO: 1255 - RNA, 23 nt, synthetic construct
  source 1..23: mol_type = other RNA
ctcaaggtgctgggagagatatg

SEQ ID NO: 1256 - RNA, 23 nt, synthetic construct
  source 1..23: mol_type = other RNA
tcaaggtgctgggagagatatgc

SEQ ID NO: 1257 - RNA, 23 nt, synthetic construct
  source 1..23: mol_type = other RNA
caaggtgctgggagagatatgcc

SEQ ID NO: 1258 - RNA, 23 nt, synthetic construct
  source 1..23: mol_type = other RNA
aaggtgctgggagagatatgcct

SEQ ID NO: 1259 - RNA, 23 nt, synthetic construct
  source 1..23: mol_type = other RNA
aggtgctgggagagatatgcctt

SEQ ID NO: 1260 - RNA, 23 nt, synthetic construct
  source 1..23: mol_type = other RNA
ggtgctgggagagatatgccttc

SEQ ID NO: 1261 - RNA, 23 nt, synthetic construct
  source 1..23: mol_type = other RNA
gctgggagagatatgccttcgag

SEQ ID NO: 1262 - RNA, 23 nt, synthetic construct
  source 1..23: mol_type = other RNA
ctgggagagatatgccttcgagg

SEQ ID NO: 1263 - RNA, 23 nt, synthetic construct
  source 1..23: mol_type = other RNA
tgggagagatatgccttcgagga

SEQ ID NO: 1264 - RNA, 23 nt, synthetic construct
  source 1..23: mol_type = other RNA
gggagagatatgccttcgaggat

SEQ ID NO: 1265 - RNA, 23 nt, synthetic construct
  source 1..23: mol_type = other RNA
gagagatatgccttcgaggatat

SEQ ID NO: 1266 - RNA, 23 nt, synthetic construct
  source 1..23: mol_type = other RNA
gagatatgccttcgaggatattt

SEQ ID NO: 1267 - RNA, 23 nt, synthetic construct
  source 1..23: mol_type = other RNA
agatatgccttcgaggatatttg

SEQ ID NO: 1268 - RNA, 23 nt, synthetic construct
  source 1..23: mol_type = other RNA
gatatgccttcgaggatatttgg

SEQ ID NO: 1269 - RNA, 23 nt, synthetic construct
  source 1..23: mol_type = other RNA
atatgccttcgaggatatttgga

SEQ ID NO: 1270 - RNA, 23 nt, synthetic construct
  source 1..23: mol_type = other RNA
tatgccttcgaggatatttggat

SEQ ID NO: 1271 - RNA, 23 nt, synthetic construct
  source 1..23: mol_type = other RNA
tgcattcaggttcttggaagaga

SEQ ID NO: 1272 - RNA, 23 nt, synthetic construct
  source 1..23: mol_type = other RNA
tcaggttcttggaagagaagggc

SEQ ID NO: 1273 - RNA, 23 nt, synthetic construct
  source 1..23: mol_type = other RNA
caggttcttggaagagaagggca

SEQ ID NO: 1274 - RNA, 23 nt, synthetic construct
  source 1..23: mol_type = other RNA
aggttcttggaagagaagggcat

SEQ ID NO: 1275 - RNA, 23 nt, synthetic construct
  source 1..23: mol_type = other RNA
ggaagagaagggcatctgcaaca

SEQ ID NO: 1276 - RNA, 23 nt, synthetic construct
  source 1..23: mol_type = other RNA
aggcctgaagtcatcctcagaag

SEQ ID NO: 1277 - RNA, 23 nt, synthetic construct
  source 1..23: mol_type = other RNA
gcctgaagtcatcctcagaaggg

SEQ ID NO: 1278 - RNA, 23 nt, synthetic construct
  source 1..23: mol_type = other RNA
cctgaagtcatcctcagaaggga

SEQ ID NO: 1279 - RNA, 23 nt, synthetic construct
  source 1..23: mol_type = other RNA
ctgaagtcatcctcagaagggat

SEQ ID NO: 1280 - RNA, 23 nt, synthetic construct
  source 1..23: mol_type = other RNA
tgaagtcatcctcagaagggatg

SEQ ID NO: 1281 - RNA, 23 nt, synthetic construct
  source 1..23: mol_type = other RNA
gaagtcatcctcagaagggatgg

SEQ ID NO: 1282 - RNA, 23 nt, synthetic construct
  source 1..23: mol_type = other RNA
agtcatcctcagaagggatggat

SEQ ID NO: 1283 - RNA, 23 nt, synthetic construct
  source 1..23: mol_type = other RNA
gagggagatgagctgctagacca

SEQ ID NO: 1284 - RNA, 23 nt, synthetic construct
  source 1..23: mol_type = other RNA
agggagatgagctgctagaccac

SEQ ID NO: 1285 - RNA, 23 nt, synthetic construct
  source 1..23: mol_type = other RNA
ggagatgagctgctagaccacct

SEQ ID NO: 1286 - RNA, 23 nt, synthetic construct
  source 1..23: mol_type = other RNA
agctgctagaccacctgcgtctc

SEQ ID NO: 1287 - RNA, 23 nt, synthetic construct
  source 1..23: mol_type = other RNA
tgctagaccacctgcgtctcagc

SEQ ID NO: 1288 - RNA, 23 nt, synthetic construct
  source 1..23: mol_type = other RNA
agaccacctgcgtctcagcatcc

SEQ ID NO: 1289 - RNA, 23 nt, synthetic construct
  source 1..23: mol_type = other RNA
ctgcgtctcagcatcctgccctg

SEQ ID NO: 1290 - RNA, 23 nt, synthetic construct
  source 1..23: mol_type = other RNA
cagcatcctgccctgggatgaga

SEQ ID NO: 1291 - RNA, 23 nt, synthetic construct
  source 1..23: mol_type = other RNA
agcatcctgccctgggatgagag

SEQ ID NO: 1292 - RNA, 23 nt, synthetic construct
  source 1..23: mol_type = other RNA
gcatcctgccctgggatgagagc

SEQ ID NO: 1293 - RNA, 23 nt, synthetic construct
  source 1..23: mol_type = other RNA
cctgccctgggatgagagcatcc

SEQ ID NO: 1294 - RNA, 23 nt, synthetic construct
  source 1..23: mol_type = other RNA
gccctgggatgagagcatcctgg

SEQ ID NO: 1295 - RNA, 23 nt, synthetic construct
  source 1..23: mol_type = other RNA
gaaatgaaagacaaaggtggata

SEQ ID NO: 1296 - RNA, 23 nt, synthetic construct
  source 1..23: mol_type = other RNA
aaatgaaagacaaaggtggatac

SEQ ID NO: 1297 - RNA, 23 nt, synthetic construct
  source 1..23: mol_type = other RNA
aaagacaaaggtggatacatgag

SEQ ID NO: 1298 - RNA, 23 nt, synthetic construct
  source 1..23: mol_type = other RNA
agacaaaggtggatacatgagca

SEQ ID NO: 1299 - RNA, 23 nt, synthetic construct
  source 1..23: mol_type = other RNA
gacaaaggtggatacatgagcaa

SEQ ID NO: 1300 - RNA, 23 nt, synthetic construct
  source 1..23: mol_type = other RNA
caaaggtggatacatgagcaaga

SEQ ID NO: 1301 - RNA, 23 nt, synthetic construct
  source 1..23: mol_type = other RNA
gtggatacatgagcaagatttgc

SEQ ID NO: 1302 - RNA, 23 nt, synthetic construct
  source 1..23: mol_type = other RNA
tggatacatgagcaagatttgca

SEQ ID NO: 1303 - RNA, 23 nt, synthetic construct
  source 1..23: mol_type = other RNA
ggatacatgagcaagatttgcaa

SEQ ID NO: 1304 - RNA, 23 nt, synthetic construct
  source 1..23: mol_type = other RNA
gatacatgagcaagatttgcaac

SEQ ID NO: 1305 - RNA, 23 nt, synthetic construct
  source 1..23: mol_type = other RNA
atacatgagcaagatttgcaact

SEQ ID NO: 1306 - RNA, 23 nt, synthetic construct
  source 1..23: mol_type = other RNA
catgagcaagatttgcaacttgc

SEQ ID NO: 1307 - RNA, 23 nt, synthetic construct
  source 1..23: mol_type = other RNA
atgagcaagatttgcaacttgct

SEQ ID NO: 1308 - RNA, 23 nt, synthetic construct
  source 1..23: mol_type = other RNA
tgagcaagatttgcaacttgcta

SEQ ID NO: 1309 - RNA, 23 nt, synthetic construct
  source 1..23: mol_type = other RNA
gagcaagatttgcaacttgctac

SEQ ID NO: 1310 - RNA, 23 nt, synthetic construct
  source 1..23: mol_type = other RNA
tttgcaacttgctacccattagg

SEQ ID NO: 1311 - RNA, 23 nt, synthetic construct
  source 1..23: mol_type = other RNA
ttgcaacttgctacccattagga

SEQ ID NO: 1312 - RNA, 23 nt, synthetic construct
  source 1..23: mol_type = other RNA
tgcaacttgctacccattaggat

SEQ ID NO: 1313 - RNA, 23 nt, synthetic construct
  source 1..23: mol_type = other RNA
gcaacttgctacccattaggata

SEQ ID NO: 1314 - RNA, 23 nt, synthetic construct
  source 1..23: mol_type = other RNA
caacttgctacccattaggataa

SEQ ID NO: 1315 - RNA, 23 nt, synthetic construct
  source 1..23: mol_type = other RNA
atgctgccctgtaccctgcctgt

SEQ ID NO: 1316 - RNA, 23 nt, synthetic construct
  source 1..23: mol_type = other RNA
tgccctgtaccctgcctgtggaa

SEQ ID NO: 1317 - RNA, 23 nt, synthetic construct
  source 1..23: mol_type = other RNA
ggaatctgccattgcgattgtcc

SEQ ID NO: 1318 - RNA, 23 nt, synthetic construct
  source 1..23: mol_type = other RNA
atctgccattgcgattgtccaga

SEQ ID NO: 1319 - RNA, 23 nt, synthetic construct
  source 1..23: mol_type = other RNA
tctgccattgcgattgtccagag

SEQ ID NO: 1320 - RNA, 23 nt, synthetic construct
  source 1..23: mol_type = other RNA
gccattgcgattgtccagagact

SEQ ID NO: 1321 - RNA, 23 nt, synthetic construct
  source 1..23: mol_type = other RNA
cattgcgattgtccagagactgg

SEQ ID NO: 1322 - RNA, 23 nt, synthetic construct
  source 1..23: mol_type = other RNA
attgcgattgtccagagactggt

SEQ ID NO: 1323 - RNA, 23 nt, synthetic construct
  source 1..23: mol_type = other RNA
ttgcgattgtccagagactggtg

SEQ ID NO: 1324 - RNA, 23 nt, synthetic construct
  source 1..23: mol_type = other RNA
tgcgattgtccagagactggtga

SEQ ID NO: 1325 - RNA, 23 nt, synthetic construct
  source 1..23: mol_type = other RNA
gcgattgtccagagactggtgac

SEQ ID NO: 1326 - RNA, 23 nt, synthetic construct
  source 1..23: mol_type = other RNA
attgtccagagactggtgacatg

SEQ ID NO: 1327 - RNA, 23 nt, synthetic construct
  source 1..23: mol_type = other RNA
tccagagactggtgacatggctt

SEQ ID NO: 1328 - RNA, 23 nt, synthetic construct
  source 1..23: mol_type = other RNA
ccagagactggtgacatggcttc

SEQ ID NO: 1329 - RNA, 23 nt, synthetic construct
  source 1..23: mol_type = other RNA
agactggtgacatggcttccaga

SEQ ID NO: 1330 - RNA, 23 nt, synthetic construct
  source 1..23: mol_type = other RNA
gactggtgacatggcttccagat

SEQ ID NO: 1331 - RNA, 23 nt, synthetic construct
  source 1..23: mol_type = other RNA
tggtgacatggcttccagatatg

SEQ ID NO: 1332 - RNA, 23 nt, synthetic construct
  source 1..23: mol_type = other RNA
ggtgacatggcttccagatatgc

SEQ ID NO: 1333 - RNA, 23 nt, synthetic construct
  source 1..23: mol_type = other RNA
gtgacatggcttccagatatgcc

SEQ ID NO: 1334 - RNA, 23 nt, synthetic construct
  source 1..23: mol_type = other RNA
tgacatggcttccagatatgccc

SEQ ID NO: 1335 - RNA, 23 nt, synthetic construct
  source 1..23: mol_type = other RNA
gacatggcttccagatatgcccg

SEQ ID NO: 1336 - RNA, 23 nt, synthetic construct
  source 1..23: mol_type = other RNA
acatggcttccagatatgcccga

SEQ ID NO: 1337 - RNA, 23 nt, synthetic construct
  source 1..23: mol_type = other RNA
tggcttccagatatgcccgacga

SEQ ID NO: 1338 - RNA, 23 nt, synthetic construct
  source 1..23: mol_type = other RNA
ttgcagtgggtgacctcacaggt

SEQ ID NO: 1339 - RNA, 23 nt, synthetic construct
  source 1..23: mol_type = other RNA
cgcctccaggtcccaaatgccag

SEQ ID NO: 1340 - RNA, 23 nt, synthetic construct
  source 1..23: mol_type = other RNA
gcctccaggtcccaaatgccagt

SEQ ID NO: 1341 - RNA, 23 nt, synthetic construct
  source 1..23: mol_type = other RNA
ccaggtcccaaatgccagtgagc

SEQ ID NO: 1342 - RNA, 23 nt, synthetic construct
  source 1..23: mol_type = other RNA
aggtcccaaatgccagtgagcag

SEQ ID NO: 1343 - RNA, 23 nt, synthetic construct
  source 1..23: mol_type = other RNA
atcctcaggtccagcctgaactt

SEQ ID NO: 1344 - RNA, 23 nt, synthetic construct
  source 1..23: mol_type = other RNA
cctcaggtccagcctgaacttct

SEQ ID NO: 1345 - RNA, 23 nt, synthetic construct
  source 1..23: mol_type = other RNA
ctcaggtccagcctgaacttctt

SEQ ID NO: 1346 - RNA, 23 nt, synthetic construct
  source 1..23: mol_type = other RNA
tcaggtccagcctgaacttcttc

SEQ ID NO: 1347 - RNA, 23 nt, synthetic construct
  source 1..23: mol_type = other RNA
caggtccagcctgaacttcttct

SEQ ID NO: 1348 - RNA, 23 nt, synthetic construct
  source 1..23: mol_type = other RNA
tcttgggcaataaagtacctgct

SEQ ID NO: 1349 - RNA, 23 nt, synthetic construct
  source 1..23: mol_type = other RNA
tgggcaataaagtacctgctggt

SEQ ID NO: 1350 - RNA, 23 nt, synthetic construct
  source 1..23: mol_type = other RNA
gcaataaagtacctgctggtgct

SEQ ID NO: 1351 - RNA, 23 nt, synthetic construct
  source 1..23: mol_type = other RNA
ataaagtacctgctggtgctgag

SEQ ID NO: 1352 - RNA, 23 nt, synthetic construct
  source 1..23: mol_type = other RNA
tcacttgaggaggcgagtctagc

SEQ ID NO: 1353 - RNA, 23 nt, synthetic construct
  source 1..23: mol_type = other RNA
aagtttcccatctttgtgcagct

SEQ ID NO: 1354 - RNA, 23 nt, synthetic construct
  source 1..23: mol_type = other RNA
tttcccatctttgtgcagctacc

SEQ ID NO: 1355 - RNA, 23 nt, synthetic construct
  source 1..23: mol_type = other RNA
cccatctttgtgcagctacctcc

SEQ ID NO: 1356 - RNA, 23 nt, synthetic construct
  source 1..23: mol_type = other RNA
tttgtgcagctacctccgcattg

SEQ ID NO: 1357 - RNA, 23 nt, synthetic construct
  source 1..23: mol_type = other RNA
tgtgcagctacctccgcattgct

SEQ ID NO: 1358 - RNA, 23 nt, synthetic construct
  source 1..23: mol_type = other RNA
cctgcctgtgacgtggaggatcc

SEQ ID NO: 1359 - RNA, 23 nt, synthetic construct
  source 1..23: mol_type = other RNA
cccagcctctgagctgagttggt

SEQ ID NO: 1360 - RNA, 23 nt, synthetic construct
  source 1..23: mol_type = other RNA
ccagcctctgagctgagttggtt

SEQ ID NO: 1361 - RNA, 23 nt, synthetic construct
  source 1..23: mol_type = other RNA
cagcctctgagctgagttggttt

SEQ ID NO: 1362 - RNA, 23 nt, synthetic construct
  source 1..23: mol_type = other RNA
agcctctgagctgagttggtttt

SEQ ID NO: 1363 - RNA, 23 nt, synthetic construct
  source 1..23: mol_type = other RNA
gcctctgagctgagttggtttta

SEQ ID NO: 1364 - RNA, 23 nt, synthetic construct
  source 1..23: mol_type = other RNA
cctctgagctgagttggttttat

SEQ ID NO: 1365 - RNA, 23 nt, synthetic construct
  source 1..23: mol_type = other RNA
ctctgagctgagttggttttatg

SEQ ID NO: 1366 - RNA, 23 nt, synthetic construct
  source 1..23: mol_type = other RNA
tctgagctgagttggttttatga

SEQ ID NO: 1367 - RNA, 23 nt, synthetic construct
  source 1..23: mol_type = other RNA
ctgagctgagttggttttatgaa

SEQ ID NO: 1368 - RNA, 23 nt, synthetic construct
  source 1..23: mol_type = other RNA
tgagctgagttggttttatgaaa

SEQ ID NO: 1369 - RNA, 23 nt, synthetic construct
  source 1..23: mol_type = other RNA
gagctgagttggttttatgaaaa

SEQ ID NO: 1370 - RNA, 23 nt, synthetic construct
  source 1..23: mol_type = other RNA
agctgagttggttttatgaaaag

SEQ ID NO: 1371 - RNA, 23 nt, synthetic construct
  source 1..23: mol_type = other RNA
ctgagttggttttatgaaaagct

SEQ ID NO: 1372 - RNA, 23 nt, synthetic construct
  source 1..23: mol_type = other RNA
tgagttggttttatgaaaagcta

SEQ ID NO: 1373 - RNA, 23 nt, synthetic construct
  source 1..23: mol_type = other RNA
gagttggttttatgaaaagctag

SEQ ID NO: 1374 - RNA, 23 nt, synthetic construct
  source 1..23: mol_type = other RNA
agttggttttatgaaaagctagg

SEQ ID NO: 1375 - RNA, 23 nt, synthetic construct
  source 1..23: mol_type = other RNA
gttggttttatgaaaagctagga

SEQ ID NO: 1376 - RNA, 23 nt, synthetic construct
  source 1..23: mol_type = other RNA
tggttttatgaaaagctaggaag

SEQ ID NO: 1377 - RNA, 23 nt, synthetic construct
  source 1..23: mol_type = other RNA
ggttttatgaaaagctaggaagc

SEQ ID NO: 1378 - RNA, 23 nt, synthetic construct
  source 1..23: mol_type = other RNA
tttatgaaaagctaggaagcaac

SEQ ID NO: 1379 - RNA, 23 nt, synthetic construct
  source 1..23: mol_type = other RNA
taattcagctggttgggaaatga

SEQ ID NO: 1380 - RNA, 23 nt, synthetic construct
  source 1..23: mol_type = other RNA
ttcagctggttgggaaatgacac

SEQ ID NO: 1381 - RNA, 23 nt, synthetic construct
  source 1..23: mol_type = other RNA
tcagctggttgggaaatgacacc

SEQ ID NO: 1382 - RNA, 23 nt, synthetic construct
  source 1..23: mol_type = other RNA
cagtgcagagggtcccttactga

SEQ ID NO: 1383 - RNA, 23 nt, synthetic construct
  source 1..23: mol_type = other RNA
agtgcagagggtcccttactgac

SEQ ID NO: 1384 - RNA, 23 nt, synthetic construct
  source 1..23: mol_type = other RNA
gtgcagagggtcccttactgact

SEQ ID NO: 1385 - RNA, 23 nt, synthetic construct
  source 1..23: mol_type = other RNA
tattaatggtcagactgttccag

SEQ ID NO: 1386 - RNA, 23 nt, synthetic construct
  source 1..23: mol_type = other RNA
attaatggtcagactgttccagc

SEQ ID NO: 1387 - RNA, 23 nt, synthetic construct
  source 1..23: mol_type = other RNA
gaacgacactgcctgtcaggtgg

SEQ ID NO: 1388 - RNA, 23 nt, synthetic construct
  source 1..23: mol_type = other RNA
gaacacctttttcacctaactaa

SEQ ID NO: 1389 - RNA, 23 nt, synthetic construct
  source 1..23: mol_type = other RNA
aacacctttttcacctaactaaa

SEQ ID NO: 1390 - RNA, 23 nt, synthetic construct
  source 1..23: mol_type = other RNA
acacctttttcacctaactaaaa

SEQ ID NO: 1391 - RNA, 23 nt, synthetic construct
  source 1..23: mol_type = other RNA
acctttttcacctaactaaaata

SEQ ID NO: 1392 - RNA, 23 nt, synthetic construct
  source 1..23: mol_type = other RNA
cctttttcacctaactaaaataa

SEQ ID NO: 1393 - RNA, 23 nt, synthetic construct
  source 1..23: mol_type = other RNA
ctttttcacctaactaaaataat

SEQ ID NO: 1394 - RNA, 23 nt, synthetic construct
  source 1..23: mol_type = other RNA
tttttcacctaactaaaataatg

SEQ ID NO: 1395 - RNA, 23 nt, synthetic construct
  source 1..23: mol_type = other RNA
ttttcacctaactaaaataatgt

SEQ ID NO: 1396 - RNA, 23 nt, synthetic construct
  source 1..23: mol_type = other RNA
tttcacctaactaaaataatgtt

SEQ ID NO: 1397 - RNA, 23 nt, synthetic construct
  source 1..23: mol_type = other RNA
ttcacctaactaaaataatgttt

SEQ ID NO: 1398 - RNA, 23 nt, synthetic construct
  source 1..23: mol_type = other RNA
tcacctaactaaaataatgttta

SEQ ID NO: 1399 - RNA, 23 nt, synthetic construct
  source 1..23: mol_type = other RNA
cacctaactaaaataatgtttaa

SEQ ID NO: 1400 - RNA, 23 nt, synthetic construct
  source 1..23: mol_type = other RNA
acctaactaaaataatgtttaaa

SEQ ID NO: 1401 - RNA, 23 nt, synthetic construct
  source 1..23: mol_type = other RNA
cctaactaaaataatgtttaaag

SEQ ID NO: 1402 - RNA, 23 nt, synthetic construct
  source 1..23: mol_type = other RNA
ctaactaaaataatgtttaaaga

SEQ ID NO: 1403 - RNA, 23 nt, synthetic construct
  source 1..23: mol_type = other RNA
taactaaaataatgtttaaagag

SEQ ID NO: 1404 - RNA, 23 nt, synthetic construct
  source 1..23: mol_type = other RNA
ttacctgttgaattttgtattat

SEQ ID NO: 1405 - RNA, 23 nt, synthetic construct
  source 1..23: mol_type = other RNA
tacctgttgaattttgtattatg

SEQ ID NO: 1406 - RNA, 23 nt, synthetic construct
  source 1..23: mol_type = other RNA
gctgcggcttcctgggcttctac

SEQ ID NO: 1407 - RNA, 23 nt, synthetic construct
  source 1..23: mol_type = other RNA
gcttcctgggcttctaccacgtc

SEQ ID NO: 1408 - RNA, 23 nt, synthetic construct
  source 1..23: mol_type = other RNA
atcccgctggagcagactctgca

SEQ ID NO: 1409 - RNA, 23 nt, synthetic construct
  source 1..23: mol_type = other RNA
agcagactctgcaggtcctctca

SEQ ID NO: 1410 - RNA, 23 nt, synthetic construct
  source 1..23: mol_type = other RNA
agactctgcaggtcctctcagat

SEQ ID NO: 1411 - RNA, 23 nt, synthetic construct
  source 1..23: mol_type = other RNA
actctgcaggtcctctcagatct

SEQ ID NO: 1412 - RNA, 23 nt, synthetic construct
  source 1..23: mol_type = other RNA
ggcatcttccatccatccttcaa

SEQ ID NO: 1413 - RNA, 23 nt, synthetic construct
  source 1..23: mol_type = other RNA
tctacagtggccttatccctcct

SEQ ID NO: 1414 - RNA, 23 nt, synthetic construct
  source 1..23: mol_type = other RNA
tacagtggccttatccctccttc

SEQ ID NO: 1415 - RNA, 23 nt, synthetic construct
  source 1..23: mol_type = other RNA
cagtggccttatccctccttcct

SEQ ID NO: 1416 - RNA, 23 nt, synthetic construct
  source 1..23: mol_type = other RNA
agtgagtgacaacgtacccttca

SEQ ID NO: 1417 - RNA, 23 nt, synthetic construct
  source 1..23: mol_type = other RNA
gtgagtgacaacgtacccttcat

SEQ ID NO: 1418 - RNA, 23 nt, synthetic construct
  source 1..23: mol_type = other RNA
caacgtacccttcattgatgcca

SEQ ID NO: 1419 - RNA, 23 nt, synthetic construct
  source 1..23: mol_type = other RNA
ggagtacgacatctgccctaaag

SEQ ID NO: 1420 - RNA, 23 nt, synthetic construct
  source 1..23: mol_type = other RNA
acatctgccctaaagtcaagtcc

SEQ ID NO: 1421 - RNA, 23 nt, synthetic construct
  source 1..23: mol_type = other RNA
gcctctgcacagggaacctctac

SEQ ID NO: 1422 - RNA, 23 nt, synthetic construct
  source 1..23: mol_type = other RNA
cctctgcacagggaacctctacc

SEQ ID NO: 1423 - RNA, 23 nt, synthetic construct
  source 1..23: mol_type = other RNA
gcacagggaacctctaccttctc

SEQ ID NO: 1424 - RNA, 23 nt, synthetic construct
  source 1..23: mol_type = other RNA
tgctgggagagatatgccttcga

SEQ ID NO: 1425 - RNA, 23 nt, synthetic construct
  source 1..23: mol_type = other RNA
ggagagatatgccttcgaggata

SEQ ID NO: 1426 - RNA, 23 nt, synthetic construct
  source 1..23: mol_type = other RNA
agagatatgccttcgaggatatt

SEQ ID NO: 1427 - RNA, 23 nt, synthetic construct
  source 1..23: mol_type = other RNA
tggaagagaagggcatctgcaac

SEQ ID NO: 1428 - RNA, 23 nt, synthetic construct
  source 1..23: mol_type = other RNA
atgagctgctagaccacctgcgt

SEQ ID NO: 1429 - RNA, 23 nt, synthetic construct
  source 1..23: mol_type = other RNA
tagaccacctgcgtctcagcatc

SEQ ID NO: 1430 - RNA, 23 nt, synthetic construct
  source 1..23: mol_type = other RNA
accacctgcgtctcagcatcctg

SEQ ID NO: 1431 - RNA, 23 nt, synthetic construct
  source 1..23: mol_type = other RNA
tgccctgggatgagagcatcctg

SEQ ID NO: 1432 - RNA, 23 nt, synthetic construct
  source 1..23: mol_type = other RNA
aaaggtggatacatgagcaagat

SEQ ID NO: 1433 - RNA, 23 nt, synthetic construct
  source 1..23: mol_type = other RNA
aaggtggatacatgagcaagatt

SEQ ID NO: 1434 - RNA, 23 nt, synthetic construct
  source 1..23: mol_type = other RNA
tacatgagcaagatttgcaactt

SEQ ID NO: 1435 - RNA, 23 nt, synthetic construct
  source 1..23: mol_type = other RNA
acatgagcaagatttgcaacttg

SEQ ID NO: 1436 - RNA, 23 nt, synthetic construct
  source 1..23: mol_type = other RNA
gatttgcaacttgctacccatta

SEQ ID NO: 1437 - RNA, 23 nt, synthetic construct
  source 1..23: mol_type = other RNA
taatgctgccctgtaccctgcct

SEQ ID NO: 1438 - RNA, 23 nt, synthetic construct
  source 1..23: mol_type = other RNA
ctgccattgcgattgtccagaga

SEQ ID NO: 1439 - RNA, 23 nt, synthetic construct
  source 1..23: mol_type = other RNA
tgccattgcgattgtccagagac

SEQ ID NO: 1440 - RNA, 23 nt, synthetic construct
  source 1..23: mol_type = other RNA
ccattgcgattgtccagagactg

SEQ ID NO: 1441 - RNA, 23 nt, synthetic construct
  source 1..23: mol_type = other RNA
gtccagagactggtgacatggct

SEQ ID NO: 1442 - RNA, 23 nt, synthetic construct
  source 1..23: mol_type = other RNA
gagactggtgacatggcttccag

SEQ ID NO: 1443 - RNA, 23 nt, synthetic construct
  source 1..23: mol_type = other RNA
actggtgacatggcttccagata

SEQ ID NO: 1444 - RNA, 23 nt, synthetic construct
  source 1..23: mol_type = other RNA
ctggtgacatggcttccagatat

SEQ ID NO: 1445 - RNA, 23 nt, synthetic construct
  source 1..23: mol_type = other RNA
catggcttccagatatgcccgac

SEQ ID NO: 1446 - RNA, 23 nt, synthetic construct
  source 1..23: mol_type = other RNA
atggcttccagatatgcccgacg

SEQ ID NO: 1447 - RNA, 23 nt, synthetic construct
  source 1..23: mol_type = other RNA
tggttgcagtgggtgacctcaca

SEQ ID NO: 1448 - RNA, 23 nt, synthetic construct
  source 1..23: mol_type = other RNA
ctccaggtcccaaatgccagtga

SEQ ID NO: 1449 - RNA, 23 nt, synthetic construct
  source 1..23: mol_type = other RNA
gggctctccacctttcccagttt

SEQ ID NO: 1450 - RNA, 23 nt, synthetic construct
  source 1..23: mol_type = other RNA
agattctttcagaggtgctaaag

SEQ ID NO: 1451 - RNA, 23 nt, synthetic construct
  source 1..23: mol_type = other RNA
gtttcccatctttgtgcagctac

SEQ ID NO: 1452 - RNA, 23 nt, synthetic construct
  source 1..23: mol_type = other RNA
gtgacgtggaggatcccagcctc

SEQ ID NO: 1453 - RNA, 23 nt, synthetic construct
  source 1..23: mol_type = other RNA
cgtggaggatcccagcctctgag

SEQ ID NO: 1454 - RNA, 23 nt, synthetic construct
  source 1..23: mol_type = other RNA
gctgagttggttttatgaaaagc

SEQ ID NO: 1455 - RNA, 23 nt, synthetic construct
  source 1..23: mol_type = other RNA
ttggttttatgaaaagctaggaa

SEQ ID NO: 1456 - RNA, 23 nt, synthetic construct
  source 1..23: mol_type = other RNA
gttttatgaaaagctaggaagca

SEQ ID NO: 1457 - RNA, 23 nt, synthetic construct
  source 1..23: mol_type = other RNA
ttttatgaaaagctaggaagcaa

SEQ ID NO: 1458 - RNA, 23 nt, synthetic construct
  source 1..23: mol_type = other RNA
ttaattcagctggttgggaaatg

SEQ ID NO: 1459 - RNA, 23 nt, synthetic construct
  source 1..23: mol_type = other RNA
tgcagagggtcccttactgactg

SEQ ID NO: 1460 - RNA, 23 nt, synthetic construct
  source 1..23: mol_type = other RNA
cctattaatggtcagactgttcc

SEQ ID NO: 1461 - RNA, 23 nt, synthetic construct
  source 1..23: mol_type = other RNA
agaacacctttttcacctaacta

SEQ ID NO: 1462 - RNA, 23 nt, synthetic construct
  source 1..23: mol_type = other RNA
cacctttttcacctaactaaaat

SEQ ID NO: 1463 - RNA, 21 nt, synthetic construct
  source 1..21: mol_type = other RNA
attaggataatgtcttatgta

SEQ ID NO: 1464 - RNA, 21 nt, synthetic construct
  source 1..21: mol_type = other RNA
gctgagttggttttatgaaaa

SEQ ID NO: 1465 - RNA, 21 nt, synthetic construct
  source 1..21: mol_type = other RNA
cacctttttcacctaactaaa

SEQ ID NO: 1466 - RNA, 21 nt, synthetic construct
  source 1..21: mol_type = other RNA
tttttcacctaactaaaataa

SEQ ID NO: 1467 - RNA, 21 nt, synthetic construct
  source 1..21: mol_type = other RNA
acctaactaaaataatgttta

SEQ ID NO: 1468 - RNA, 21 nt, synthetic construct
  source 1..21: mol_type = other RNA
ggggtaacaagatgataatct

SEQ ID NO: 1469 - RNA, 21 nt, synthetic construct
  source 1..21: mol_type = other RNA
ctccatggcgggggtaacaaa

SEQ ID NO: 1470 - RNA, 21 nt, synthetic construct
  source 1..21: mol_type = other RNA
taggataatgtcttatgtaat

SEQ ID NO: 1471 - RNA, 21 nt, synthetic construct
  source 1..21: mol_type = other RNA
cctaactaaaataatgtttaa

SEQ ID NO: 1472 - RNA, 21 nt, synthetic construct
  source 1..21: mol_type = other RNA
atgttagtagaataagcctta

SEQ ID NO: 1473 - RNA, 21 nt, synthetic construct
  source 1..21: mol_type = other RNA
tgagtgaagaaatgaaagaca

SEQ ID NO: 1474 - RNA, 21 nt, synthetic construct
  source 1..21: mol_type = other RNA
gatttgcaacttgctacccat

SEQ ID NO: 1475 - RNA, 21 nt, synthetic construct
  source 1..21: mol_type = other RNA
ataatgtcttatgtaatgctt

SEQ ID NO: 1476 - RNA, 21 nt, synthetic construct
  source 1..21: mol_type = other RNA
aacttgctacccattaggata

SEQ ID NO: 1477 - RNA, 21 nt, synthetic construct
  source 1..21: mol_type = other RNA
ttttagaacacctttttcact

SEQ ID NO: 1478 - RNA, 21 nt, synthetic construct
  source 1..21: mol_type = other RNA
atacatgagcaagatttgcaa

SEQ ID NO: 1479 - RNA, 21 nt, synthetic construct
  source 1..21: mol_type = other RNA
ggccttatccctccttcctta

SEQ ID NO: 1480 - RNA, 21 nt, synthetic construct
  source 1..21: mol_type = other RNA
tggatacatgagcaagattta

SEQ ID NO: 1481 - RNA, 21 nt, synthetic construct
  source 1..21: mol_type = other RNA
ctattaatggtcagactgtta

SEQ ID NO: 1482 - RNA, 21 nt, synthetic construct
  source 1..21: mol_type = other RNA
gcacagggaacctctacctta

SEQ ID NO: 1483 - RNA, 21 nt, synthetic construct
  source 1..21: mol_type = other RNA
ttatgtaatgctgccctgtaa

SEQ ID NO: 1484 - RNA, 21 nt, synthetic construct
  source 1..21: mol_type = other RNA
gtgagtgacaacgtaccctta

SEQ ID NO: 1485 - RNA, 21 nt, synthetic construct
  source 1..21: mol_type = other RNA
gtgctaaagtttcccatcttt

SEQ ID NO: 1486 - RNA, 21 nt, synthetic construct
  source 1..21: mol_type = other RNA
tacctgttgaattttgtatta

SEQ ID NO: 1487 - RNA, 21 nt, synthetic construct
  source 1..21: mol_type = other RNA
cgacatctgccctaaagtcaa

SEQ ID NO: 1488 - RNA, 21 nt, synthetic construct
  source 1..21: mol_type = other RNA
tggtgacatggcttccagata

SEQ ID NO: 1489 - RNA, 21 nt, synthetic construct
  source 1..21: mol_type = other RNA
ttgctacccattaggataata

SEQ ID NO: 1490 - RNA, 21 nt, synthetic construct
  source 1..21: mol_type = other RNA
aaatgaaagacaaaggtggat

SEQ ID NO: 1491 - RNA, 21 nt, synthetic construct
  source 1..21: mol_type = other RNA
tgggagagatatgccttcgaa

SEQ ID NO: 1492 - RNA, 21 nt, synthetic construct
  source 1..21: mol_type = other RNA
agcatgaggttcttagaatgt

SEQ ID NO: 1493 - RNA, 21 nt, synthetic construct
  source 1..21: mol_type = other RNA
aggaagcaacctttcgcctgt

SEQ ID NO: 1494 - RNA, 21 nt, synthetic construct
  source 1..21: mol_type = other RNA
ttggttttatgaaaagctaga

SEQ ID NO: 1495 - RNA, 21 nt, synthetic construct
  source 1..21: mol_type = other RNA
tcacttgaggaggcgagtcta

SEQ ID NO: 1496 - RNA, 21 nt, synthetic construct
  source 1..21: mol_type = other RNA
caagatttgcaacttgctaca

SEQ ID NO: 1497 - RNA, 21 nt, synthetic construct
  source 1..21: mol_type = other RNA
tgccaaaacaaccatcaccgt

SEQ ID NO: 1498 - RNA, 21 nt, synthetic construct
  source 1..21: mol_type = other RNA
ccattaggataatgtcttatt

SEQ ID NO: 1499 - RNA, 21 nt, synthetic construct
  source 1..21: mol_type = other RNA
ttacctgttgaattttgtatt

SEQ ID NO: 1500 - RNA, 23 nt, synthetic construct
  source 1..23: mol_type = other RNA
tacataagacattatcctaatgg

SEQ ID NO: 1501 - RNA, 23 nt, synthetic construct
  source 1..23: mol_type = other RNA
ttttcataaaaccaactcagctc

SEQ ID NO: 1502 - RNA, 23 nt, synthetic construct
  source 1..23: mol_type = other RNA
tttagttaggtgaaaaaggtgtt

SEQ ID NO: 1503 - RNA, 23 nt, synthetic construct
  source 1..23: mol_type = other RNA
ttattttagttaggtgaaaaagg

SEQ ID NO: 1504 - RNA, 23 nt, synthetic construct
  source 1..23: mol_type = other RNA
taaacattattttagttaggtga

SEQ ID NO: 1505 - RNA, 23 nt, synthetic construct
  source 1..23: mol_type = other RNA
agattatcatcttgttacccccg

SEQ ID NO: 1506 - RNA, 23 nt, synthetic construct
  source 1..23: mol_type = other RNA
tttgttacccccgccatggagac

SEQ ID NO: 1507 - RNA, 23 nt, synthetic construct
  source 1..23: mol_type = other RNA
  modified_base 2: mod_base = OTHER; note = 5'-methyluridine-3'-phosphate
  modified_base 7: mod_base = OTHER; note = 5'-methyluridine-3'-phosphate
attacataagacattatcctaat

SEQ ID NO: 1508 - RNA, 23 nt, synthetic construct
  source 1..23: mol_type = other RNA
  modified_base 2: mod_base = OTHER; note = 5'-methyluridine-3'-phosphate
  modified_base 12: mod_base = OTHER; note = 5'-methyluridine-3'-phosphate
ttaaacattattttagttaggtg

SEQ ID NO: 1509 - RNA, 23 nt, synthetic construct
  source 1..23: mol_type = other RNA
  modified_base 7: mod_base = OTHER; note = 5'-methyluridine-3'-phosphate
taaggcttattctactaacatct

SEQ ID NO: 1510 - RNA, 23 nt, synthetic construct
  source 1..23: mol_type = other RNA
  modified_base 2: mod_base = OTHER; note = 5'-methyluridine-3'-phosphate
  modified_base 7: mod_base = OTHER; note = 5'-methyluridine-3'-phosphate
tttagttaggtgaaaaaggtgtt

SEQ ID NO: 1511 - RNA, 23 nt, synthetic construct
  source 1..23: mol_type = other RNA
  modified_base 5: mod_base = OTHER; note = 5'-methyluridine-3'-phosphate
  modified_base 7: mod_base = OTHER; note = 5'-methyluridine-3'-phosphate
  modified_base 12: mod_base = OTHER; note = 5'-methyluridine-3'-phosphate
tgtctttcatttcttcactcagt

SEQ ID NO: 1512 - RNA, 23 nt, synthetic construct
  source 1..23: mol_type = other RNA
  modified_base 7: mod_base = OTHER; note = 5'-methyluridine-3'-phosphate
  modified_base 12: mod_base = OTHER; note = 5'-methyluridine-3'-phosphate
taaacattattttagttaggtga

SEQ ID NO: 1513 - RNA, 23 nt, synthetic construct
  source 1..23: mol_type = other RNA
  modified_base 2: mod_base = OTHER; note = 5'-methyluridine-3'-phosphate
  modified_base 5: mod_base = OTHER; note = 5'-methyluridine-3'-phosphate
  modified_base 7: mod_base = OTHER; note = 5'-methyluridine-3'-phosphate
ttattttagttaggtgaaaaagg

SEQ ID NO: 1514 - RNA, 23 nt, synthetic construct
  source 1..23: mol_type = other RNA
  modified_base 2: mod_base = OTHER; note = 5'-methyluridine-3'-phosphate
atgggtagcaagttgcaaatctt

SEQ ID NO: 1515 - RNA, 23 nt, synthetic construct
  source 1..23: mol_type = other RNA
  modified_base 7: mod_base = OTHER; note = 5'-methyluridine-3'-phosphate
aagcattacataagacattatcc

SEQ ID NO: 1516 - RNA, 23 nt, synthetic construct
  source 1..23: mol_type = other RNA
tatcctaatgggtagcaagttgc

SEQ ID NO: 1517 - RNA, 23 nt, synthetic construct
  source 1..23: mol_type = other RNA
  modified_base 2: mod_base = OTHER; note = 5'-methyluridine-3'-phosphate
  modified_base 5: mod_base = OTHER; note = 5'-methyluridine-3'-phosphate
attttcataaaaccaactcagct

SEQ ID NO: 1518 - RNA, 23 nt, synthetic construct
  source 1..23: mol_type = other RNA
  modified_base 2: mod_base = OTHER; note = 5'-methyluridine-3'-phosphate
  modified_base 5: mod_base = OTHER; note = 5'-methyluridine-3'-phosphate
  modified_base 12: mod_base = OTHER; note = 5'-methyluridine-3'-phosphate
ataatacaaaattcaacaggtaa

SEQ ID NO: 1519 - RNA, 23 nt, synthetic construct
  source 1..23: mol_type = other RNA
  modified_base 12: mod_base = OTHER; note = 5'-methyluridine-3'-phosphate
agtgaaaaaggtgttctaaaatt

SEQ ID NO: 1520 - RNA, 23 nt, synthetic construct
  source 1..23: mol_type = other RNA
  modified_base 2: mod_base = OTHER; note = 5'-methyluridine-3'-phosphate
ttgcaaatcttgctcatgtatcc

SEQ ID NO: 1521 - RNA, 23 nt, synthetic construct
  source 1..23: mol_type = other RNA
  modified_base 2: mod_base = OTHER; note = 5'-methyluridine-3'-phosphate
  modified_base 12: mod_base = OTHER; note = 5'-methyluridine-3'-phosphate
ataaaaccaactcagctcagagg

SEQ ID NO: 1522 - RNA, 23 nt, synthetic construct
  source 1..23: mol_type = other RNA
  modified_base 2: mod_base = OTHER; note = 5'-methyluridine-3'-phosphate
  modified_base 7: mod_base = OTHER; note = 5'-methyluridine-3'-phosphate
ttttcataaaaccaactcagctc

SEQ ID NO: 1523 - RNA, 23 nt, synthetic construct
  source 1..23: mol_type = other RNA
taaggaaggagggataaggccac

SEQ ID NO: 1524 - RNA, 23 nt, synthetic construct
  source 1..23: mol_type = other RNA
  modified_base 2: mod_base = OTHER; note = 5'-methyluridine-3'-phosphate
  modified_base 7: mod_base = OTHER; note = 5'-methyluridine-3'-phosphate
attagttaggtgaaaaaggtgtt

SEQ ID NO: 1525 - RNA, 23 nt, synthetic construct
  source 1..23: mol_type = other RNA
  modified_base 5: mod_base = OTHER; note = 5'-methyluridine-3'-phosphate
  modified_base 7: mod_base = OTHER; note = 5'-methyluridine-3'-phosphate
taaatcttgctcatgtatccacc

SEQ ID NO: 1526 - RNA, 23 nt, synthetic construct
  source 1..23: mol_type = other RNA
  modified_base 7: mod_base = OTHER; note = 5'-methyluridine-3'-phosphate
taacagtctgaccattaataggg

SEQ ID NO: 1527 - RNA, 23 nt, synthetic construct
  source 1..23: mol_type = other RNA
  modified_base 12: mod_base = OTHER; note = 5'-methyluridine-3'-phosphate
taaggtagaggttccctgtgcag

SEQ ID NO: 1528 - RNA, 23 nt, synthetic construct
  source 1..23: mol_type = other RNA
  modified_base 2: mod_base = OTHER; note = 5'-methyluridine-3'-phosphate
ttacagggcagcattacataaga

SEQ ID NO: 1529 - RNA, 23 nt, synthetic construct
  source 1..23: mol_type = other RNA
  modified_base 7: mod_base = OTHER; note = 5'-methyluridine-3'-phosphate
  modified_base 12: mod_base = OTHER; note = 5'-methyluridine-3'-phosphate
taagggtacgttgtcactcactc

SEQ ID NO: 1530 - RNA, 23 nt, synthetic construct
  source 1..23: mol_type = other RNA
aaagatgggaaactttagcacct

SEQ ID NO: 1531 - RNA, 23 nt, synthetic construct
  source 1..23: mol_type = other RNA
  modified_base 12: mod_base = OTHER; note = 5'-methyluridine-3'-phosphate
taatacaaaattcaacaggtaac

SEQ ID NO: 1532 - RNA, 23 nt, synthetic construct
  source 1..23: mol_type = other RNA
  modified_base 5: mod_base = OTHER; note = 5'-methyluridine-3'-phosphate
  modified_base 7: mod_base = OTHER; note = 5'-methyluridine-3'-phosphate
  modified_base 12: mod_base = OTHER; note = 5'-methyluridine-3'-phosphate
agattatcatcttgttacccccg

SEQ ID NO: 1533 - RNA, 23 nt, synthetic construct
  source 1..23: mol_type = other RNA
  modified_base 2: mod_base = OTHER; note = 5'-methyluridine-3'-phosphate
  modified_base 7: mod_base = OTHER; note = 5'-methyluridine-3'-phosphate
ttgactttagggcagatgtcgta

SEQ ID NO: 1534 - RNA, 23 nt, synthetic construct
  source 1..23: mol_type = other RNA
  modified_base 5: mod_base = OTHER; note = 5'-methyluridine-3'-phosphate
tatctggaagccatgtcaccagt

SEQ ID NO: 1535 - RNA, 23 nt, synthetic construct
  source 1..23: mol_type = other RNA
  modified_base 12: mod_base = OTHER; note = 5'-methyluridine-3'-phosphate
tattatcctaatgggtagcaagt

SEQ ID NO: 1536 - RNA, 23 nt, synthetic construct
  source 1..23: mol_type = other RNA
  modified_base 2: mod_base = OTHER; note = 5'-methyluridine-3'-phosphate
  modified_base 12: mod_base = OTHER; note = 5'-methyluridine-3'-phosphate
atccacctttgtctttcatttct

SEQ ID NO: 1537 - RNA, 23 nt, synthetic construct
  source 1..23: mol_type = other RNA
  modified_base 2: mod_base = OTHER; note = 5'-methyluridine-3'-phosphate
ttcgaaggcatatctctcccagc

SEQ ID NO: 1538 - RNA, 23 nt, synthetic construct
  source 1..23: mol_type = other RNA
  modified_base 2: mod_base = OTHER; note = 5'-methyluridine-3'-phosphate
  modified_base 5: mod_base = OTHER; note = 5'-methyluridine-3'-phosphate
tttgttacccccgccatggagac

SEQ ID NO: 1539 - RNA, 23 nt, synthetic construct
  source 1..23: mol_type = other RNA
  modified_base 5: mod_base = OTHER; note = 5'-methyluridine-3'-phosphate
  modified_base 7: mod_base = OTHER; note = 5'-methyluridine-3'-phosphate
acattctaagaacctcatgctgg

SEQ ID NO: 1540 - RNA, 23 nt, synthetic construct
  source 1..23: mol_type = other RNA
acaggcgaaaggttgcttcctag

SEQ ID NO: 1541 - RNA, 23 nt, synthetic construct
  source 1..23: mol_type = other RNA
  modified_base 7: mod_base = OTHER; note = 5'-methyluridine-3'-phosphate
tctagcttttcataaaaccaact

SEQ ID NO: 1542 - RNA, 23 nt, synthetic construct
  source 1..23: mol_type = other RNA
  modified_base 5: mod_base = OTHER; note = 5'-methyluridine-3'-phosphate
  modified_base 12: mod_base = OTHER; note = 5'-methyluridine-3'-phosphate
tacataagacattatcctaatgg

SEQ ID NO: 1543 - RNA, 23 nt, synthetic construct
  source 1..23: mol_type = other RNA
tagactcgcctcctcaagtgact

SEQ ID NO: 1544 - RNA, 23 nt, synthetic construct
  source 1..23: mol_type = other RNA
tgtagcaagttgcaaatcttgct

SEQ ID NO: 1545 - RNA, 23 nt, synthetic construct
  source 1..23: mol_type = other RNA
  modified_base 5: mod_base = OTHER; note = 5'-methyluridine-3'-phosphate
  modified_base 12: mod_base = OTHER; note = 5'-methyluridine-3'-phosphate
acggtgatggttgttttggcatc

SEQ ID NO: 1546 - RNA, 23 nt, synthetic construct
  source 1..23: mol_type = other RNA
aataagacattatcctaatgggt

SEQ ID NO: 1547 - RNA, 23 nt, synthetic construct
  source 1..23: mol_type = other RNA
aatacaaaattcaacaggtaaca

SEQ ID NO: 1548 - RNA, 23 nt, synthetic construct
  source 1..23: mol_type = other RNA
acggtgatggttgttttggcatc

SEQ ID NO: 1549 - RNA, 23 nt, synthetic construct
  source 1..23: mol_type = other RNA
attacataagacattatcctaat

SEQ ID NO: 1550 - RNA, 23 nt, synthetic construct
  source 1..23: mol_type = other RNA
aagcattacataagacattatcc

SEQ ID NO: 1551 - RNA, 23 nt, synthetic construct
  source 1..23: mol_type = other RNA
attttcataaaaccaactcagct

SEQ ID NO: 1552 - RNA, 23 nt, synthetic construct
  source 1..23: mol_type = other RNA
acattctaagaacctcatgctgg

SEQ ID NO: 1553 - RNA, 23 nt, synthetic construct
  source 1..23: mol_type = other RNA
agtgaaaaaggtgttctaaaatt

SEQ ID NO: 1554 - RNA, 23 nt, synthetic construct
  source 1..23: mol_type = other RNA
attagttaggtgaaaaaggtgtt

SEQ ID NO: 1555 - RNA, 23 nt, synthetic construct
  source 1..23: mol_type = other RNA
ttgcaaatcttgctcatgtatcc

SEQ ID NO: 1556 - RNA, 23 nt, synthetic construct
  source 1..23: mol_type = other RNA
taacagtctgaccattaataggg

SEQ ID NO: 1557 - RNA, 23 nt, synthetic construct
  source 1..23: mol_type = other RNA
taaatcttgctcatgtatccacc

SEQ ID NO: 1558 - RNA, 23 nt, synthetic construct
  source 1..23: mol_type = other RNA
taaggcttattctactaacatct

SEQ ID NO: 1559 - RNA, 23 nt, synthetic construct
  source 1..23: mol_type = other RNA
tctagcttttcataaaaccaact

SEQ ID NO: 1560 - RNA, 23 nt, synthetic construct
  source 1..23: mol_type = other RNA
taaggtagaggttccctgtgcag

SEQ ID NO: 1561 - RNA, 23 nt, synthetic construct
  source 1..23: mol_type = other RNA
tatctggaagccatgtcaccagt

SEQ ID NO: 1562 - RNA, 23 nt, synthetic construct
  source 1..23: mol_type = other RNA
ttgactttagggcagatgtcgta

SEQ ID NO: 1563 - RNA, 23 nt, synthetic construct
  source 1..23: mol_type = other RNA
taagggtacgttgtcactcactc

SEQ ID NO: 1564 - RNA, 23 nt, synthetic construct
  source 1..23: mol_type = other RNA
ttaaacattattttagttaggtg

SEQ ID NO: 1565 - RNA, 23 nt, synthetic construct
  source 1..23: mol_type = other RNA
ttcgaaggcatatctctcccagc

SEQ ID NO: 1566 - RNA, 23 nt, synthetic construct
  source 1..23: mol_type = other RNA
atccacctttgtctttcatttct

SEQ ID NO: 1567 - RNA, 23 nt, synthetic construct
  source 1..23: mol_type = other RNA
aagttgcaaatcttgctcatgta

SEQ ID NO: 1568 - RNA, 23 nt, synthetic construct
  source 1..23: mol_type = other RNA
tgtctttcatttcttcactcagt

SEQ ID NO: 1569 - RNA, 23 nt, synthetic construct
  source 1..23: mol_type = other RNA
taatacaaaattcaacaggtaac

SEQ ID NO: 1570 - RNA, 23 nt, synthetic construct
  source 1..23: mol_type = other RNA
tattatcctaatgggtagcaagt

SEQ ID NO: 1571 - RNA, 23 nt, synthetic construct
  source 1..23: mol_type = other RNA
ttacagggcagcattacataaga

SEQ ID NO: 1572 - RNA, 23 nt, synthetic construct
  source 1..23: mol_type = other RNA
atgggtagcaagttgcaaatctt

SEQ ID NO: 1573 - RNA, 21 nt, synthetic construct
  source 1..21: mol_type = other RNA
  modified_base 1: mod_base = OTHER; note = 2'-O-methyladenosine-3'-phosphorothioate
  modified_base 2: mod_base = OTHER; note = 2'-O-methyluridine-3'-phosphorothioate
  modified_base 3: mod_base = OTHER; note = 2'-O-methyluridine-3'-phosphate
  modified_base 4: mod_base = OTHER; note = 2'-O-methyladenosine-3'-phosphate
  modified_base 5: mod_base = OTHER; note = 2'-O-methylguanosine-3'-phosphate
  modified_base 6: mod_base = OTHER; note = 2'-O-methylguanosine-3'-phosphate
  modified_base 7: mod_base = OTHER; note = 2'-deoxy-2'-fluoroadenosine-3'-phosphate
  modified_base 8: mod_base = OTHER; note = 2'-O-methyluridine-3'-phosphate
  modified_base 9: mod_base = OTHER; note = 2'-deoxy-2'-fluoroadenosine-3'-phosphate
  modified_base 10: mod_base = OTHER; note = 2'-deoxy-2'-fluoroadenosine-3'-phosphate
  modified_base 11: mod_base = OTHER; note = 2'-deoxy-2'-fluorouridine-3'-phosphate
  modified_base 12: mod_base = OTHER; note = 2'-O-methylguanosine-3'-phosphate
  modified_base 13: mod_base = OTHER; note = 2'-O-methyluridine-3'-phosphate
  modified_base 14: mod_base = OTHER; note = 2'-O-methylcytidine-3'-phosphate
  modified_base 15: mod_base = OTHER; note = 2'-O-methyluridine-3'-phosphate
  modified_base 16: mod_base = OTHER; note = 2'-O-methyluridine-3'-phosphate
  modified_base 17: mod_base = OTHER; note = 2'-O-methyladenosine-3'-phosphate
  modified_base 18: mod_base = OTHER; note = 2'-O-methyluridine-3'-phosphate
  modified_base 19: mod_base = OTHER; note = 2'-O-methylguanosine-3'-phosphate
  modified_base 20: mod_base = OTHER; note = 2'-O-methyluridine-3'-phosphate
  modified_base 21: mod_base = OTHER; note = 2'-O-methyladenosine-3'-phosphate ((2S,4R)-1-[29-[[2-(acetylamino)-2-deoxy-beta-D-galactopyra nosyl]oxy]-14,14-bis[[3-[[3-[[5-[[2-(acetylamino)-2-deoxy-b eta-D-galactopyranosyl]oxy]-1-oxopentyl]amino]propyl]amino] -3-oxopropoxy]methyl]-1,12,19,25-tetraoxo-16-oxa-13,20,24-t riazanonacos-1-yl]-4-hydroxy-2-pyrrolidinyl)methyl ester
attaggataatgtcttatgta

SEQ ID NO: 1574 - RNA, 21 nt, synthetic construct
  source 1..21: mol_type = other RNA
  modified_base 1: mod_base = OTHER; note = 2'-O-methylguanosine-3'-phosphorothioate
  modified_base 2: mod_base = OTHER; note = 2'-O-methylcytidine-3'-phosphorothioate
  modified_base 3: mod_base = OTHER; note = 2'-O-methyluridine-3'-phosphate
  modified_base 4: mod_base = OTHER; note = 2'-O-methylguanosine-3'-phosphate
  modified_base 5: mod_base = OTHER; note = 2'-O-methyladenosine-3'-phosphate
  modified_base 6: mod_base = OTHER; note = 2'-O-methylguanosine-3'-phosphate
  modified_base 7: mod_base = OTHER; note = 2'-deoxy-2'-fluorouridine-3'-phosphate
  modified_base 8: mod_base = OTHER; note = 2'-O-methyluridine-3'-phosphate
  modified_base 9: mod_base = OTHER; note = 2'-deoxy-2'-fluoroguanosine-3'-phosphate
  modified_base 10: mod_base = OTHER; note = 2'-deoxy-2'-fluoroguanosine-3'-phosphate
  modified_base 11: mod_base = OTHER; note = 2'-deoxy-2'-fluorouridine-3'-phosphate
  modified_base 12: mod_base = OTHER; note = 2'-O-methyluridine-3'-phosphate
  modified_base 13: mod_base = OTHER; note = 2'-O-methyluridine-3'-phosphate
  modified_base 14: mod_base = OTHER; note = 2'-O-methyluridine-3'-phosphate
  modified_base 15: mod_base = OTHER; note = 2'-O-methyladenosine-3'-phosphate
  modified_base 16: mod_base = OTHER; note = 2'-O-methyluridine-3'-phosphate
  modified_base 17: mod_base = OTHER; note = 2'-O-methylguanosine-3'-phosphate
  modified_base 18: mod_base = OTHER; note = 2'-O-methyladenosine-3'-phosphate
  modified_base 19: mod_base = OTHER; note = 2'-O-methyladenosine-3'-phosphate
  modified_base 20: mod_base = OTHER; note = 2'-O-methyladenosine-3'-phosphate
  modified_base 21: mod_base = OTHER; note = 2'-O-methyladenosine-3'-phosphate ((2S,4R)-1-[29-[[2-(acetylamino)-2-deoxy-beta-D-galactopyra nosyl]oxy]-14,14-bis[[3-[[3-[[5-[[2-(acetylamino)-2-deoxy-b eta-D-galactopyranosyl]oxy]-1-oxopentyl]amino]propyl]amino] -3-oxopropoxy]methyl]-1,12,19,25-tetraoxo-16-oxa-13,20,24-t riazanonacos-1-yl]-4-hydroxy-2-pyrrolidinyl)methyl ester
gctgagttggttttatgaaaa

SEQ ID NO: 1575 - RNA, 21 nt, synthetic construct
  source 1..21: mol_type = other RNA
  modified_base 1: mod_base = OTHER; note = 2'-O-methylcytidine-3'-phosphorothioate
  modified_base 2: mod_base = OTHER; note = 2'-O-methyladenosine-3'-phosphorothioate
  modified_base 3: mod_base = OTHER; note = 2'-O-methylcytidine-3'-phosphate
  modified_base 4: mod_base = OTHER; note = 2'-O-methylcytidine-3'-phosphate
  modified_base 5: mod_base = OTHER; note = 2'-O-methyluridine-3'-phosphate
  modified_base 6: mod_base = OTHER; note = 2'-O-methyluridine-3'-phosphate
  modified_base 7: mod_base = OTHER; note = 2'-deoxy-2'-fluorouridine-3'-phosphate
  modified_base 8: mod_base = OTHER; note = 2'-O-methyluridine-3'-phosphate
  modified_base 9: mod_base = OTHER; note = 2'-deoxy-2'-fluorouridine-3'-phosphate
  modified_base 10: mod_base = OTHER; note = 2'-deoxy-2'-fluorocytidine-3'-phosphate
  modified_base 11: mod_base = OTHER; note = 2'-deoxy-2'-fluoroadenosine-3'-phosphate
  modified_base 12: mod_base = OTHER; note = 2'-O-methylcytidine-3'-phosphate
  modified_base 13: mod_base = OTHER; note = 2'-O-methylcytidine-3'-phosphate
  modified_base 14: mod_base = OTHER; note = 2'-O-methyluridine-3'-phosphate
  modified_base 15: mod_base = OTHER; note = 2'-O-methyladenosine-3'-phosphate
  modified_base 16: mod_base = OTHER; note = 2'-O-methyladenosine-3'-phosphate
  modified_base 17: mod_base = OTHER; note = 2'-O-methylcytidine-3'-phosphate
  modified_base 18: mod_base = OTHER; note = 2'-O-methyluridine-3'-phosphate
  modified_base 19: mod_base = OTHER; note = 2'-O-methyladenosine-3'-phosphate
  modified_base 20: mod_base = OTHER; note = 2'-O-methyladenosine-3'-phosphate
  modified_base 21: mod_base = OTHER; note = 2'-O-methyladenosine-3'-phosphate ((2S,4R)-1-[29-[[2-(acetylamino)-2-deoxy-beta-D-galactopyra nosyl]oxy]-14,14-bis[[3-[[3-[[5-[[2-(acetylamino)-2-deoxy-b eta-D-galactopyranosyl]oxy]-1-oxopentyl]amino]propyl]amino] -3-oxopropoxy]methyl]-1,12,19,25-tetraoxo-16-oxa-13,20,24-t riazanonacos-1-yl]-4-hydroxy-2-pyrrolidinyl)methyl ester
cacctttttcacctaactaaa

SEQ ID NO: 1576 - RNA, 21 nt, synthetic construct
  source 1..21: mol_type = other RNA
  modified_base 1: mod_base = OTHER; note = 2'-O-methyluridine-3'-phosphorothioate
  modified_base 2: mod_base = OTHER; note = 2'-O-methyluridine-3'-phosphorothioate
  modified_base 3: mod_base = OTHER; note = 2'-O-methyluridine-3'-phosphate
  modified_base 4: mod_base = OTHER; note = 2'-O-methyluridine-3'-phosphate
  modified_base 5: mod_base = OTHER; note = 2'-O-methyluridine-3'-phosphate
  modified_base 6: mod_base = OTHER; note = 2'-O-methylcytidine-3'-phosphate
  modified_base 7: mod_base = OTHER; note = 2'-deoxy-2'-fluoroadenosine-3'-phosphate
  modified_base 8: mod_base = OTHER; note = 2'-O-methylcytidine-3'-phosphate
  modified_base 9: mod_base = OTHER; note = 2'-deoxy-2'-fluorocytidine-3'-phosphate
  modified_base 10: mod_base = OTHER; note = 2'-deoxy-2'-fluorouridine-3'-phosphate
  modified_base 11: mod_base = OTHER; note = 2'-deoxy-2'-fluoroadenosine-3'-phosphate
  modified_base 12: mod_base = OTHER; note = 2'-O-methyladenosine-3'-phosphate
  modified_base 13: mod_base = OTHER; note = 2'-O-methylcytidine-3'-phosphate
  modified_base 14: mod_base = OTHER; note = 2'-O-methyluridine-3'-phosphate
  modified_base 15: mod_base = OTHER; note = 2'-O-methyladenosine-3'-phosphate
  modified_base 16: mod_base = OTHER; note = 2'-O-methyladenosine-3'-phosphate
  modified_base 17: mod_base = OTHER; note = 2'-O-methyladenosine-3'-phosphate
  modified_base 18: mod_base = OTHER; note = 2'-O-methyladenosine-3'-phosphate
  modified_base 19: mod_base = OTHER; note = 2'-O-methyluridine-3'-phosphate
  modified_base 20: mod_base = OTHER; note = 2'-O-methyladenosine-3'-phosphate
  modified_base 21: mod_base = OTHER; note = 2'-O-methyladenosine-3'-phosphate ((2S,4R)-1-[29-[[2-(acetylamino)-2-deoxy-beta-D-galactopyra nosyl]oxy]-14,14-bis[[3-[[3-[[5-[[2-(acetylamino)-2-deoxy-b eta-D-galactopyranosyl]oxy]-1-oxopentyl]amino]propyl]amino] -3-oxopropoxy]methyl]-1,12,19,25-tetraoxo-16-oxa-13,20,24-t riazanonacos-1-yl]-4-hydroxy-2-pyrrolidinyl)methyl ester
tttttcacctaactaaaataa

SEQ ID NO: 1577 - RNA, 21 nt, synthetic construct
  source 1..21: mol_type = other RNA
  modified_base 1: mod_base = OTHER; note = 2'-O-methyladenosine-3'-phosphorothioate
  modified_base 2: mod_base = OTHER; note = 2'-O-methylcytidine-3'-phosphorothioate
  modified_base 3: mod_base = OTHER; note = 2'-O-methylcytidine-3'-phosphate
  modified_base 4: mod_base = OTHER; note = 2'-O-methyluridine-3'-phosphate
  modified_base 5: mod_base = OTHER; note = 2'-O-methyladenosine-3'-phosphate
  modified_base 6: mod_base = OTHER; note = 2'-O-methyladenosine-3'-phosphate
  modified_base 7: mod_base = OTHER; note = 2'-deoxy-2'-fluorocytidine-3'-phosphate
  modified_base 8: mod_base = OTHER; note = 2'-O-methyluridine-3'-phosphate
  modified_base 9: mod_base = OTHER; note = 2'-deoxy-2'-fluoroadenosine-3'-phosphate
  modified_base 10: mod_base = OTHER; note = 2'-deoxy-2'-fluoroadenosine-3'-phosphate
  modified_base 11: mod_base = OTHER; note = 2'-deoxy-2'-fluoroadenosine-3'-phosphate
  modified_base 12: mod_base = OTHER; note = 2'-O-methyladenosine-3'-phosphate
  modified_base 13: mod_base = OTHER; note = 2'-O-methyluridine-3'-phosphate
  modified_base 14: mod_base = OTHER; note = 2'-O-methyladenosine-3'-phosphate
  modified_base 15: mod_base = OTHER; note = 2'-O-methyladenosine-3'-phosphate
  modified_base 16: mod_base = OTHER; note = 2'-O-methyluridine-3'-phosphate
  modified_base 17: mod_base = OTHER; note = 2'-O-methylguanosine-3'-phosphate
  modified_base 18: mod_base = OTHER; note = 2'-O-methyluridine-3'-phosphate
  modified_base 19: mod_base = OTHER; note = 2'-O-methyluridine-3'-phosphate
  modified_base 20: mod_base = OTHER; note = 2'-O-methyluridine-3'-phosphate
  modified_base 21: mod_base = OTHER; note = 2'-O-methyladenosine-3'-phosphate ((2S,4R)-1-[29-[[2-(acetylamino)-2-deoxy-beta-D-galactopyra nosyl]oxy]-14,14-bis[[3-[[3-[[5-[[2-(acetylamino)-2-deoxy-b eta-D-galactopyranosyl]oxy]-1-oxopentyl]amino]propyl]amino] -3-oxopropoxy]methyl]-1,12,19,25-tetraoxo-16-oxa-13,20,24-t riazanonacos-1-yl]-4-hydroxy-2-pyrrolidinyl)methyl ester
acctaactaaaataatgttta

SEQ ID NO: 1578 - RNA, 21 nt, synthetic construct
  source 1..21: mol_type = other RNA
  modified_base 1: mod_base = OTHER; note = 2'-O-methylguanosine-3'-phosphorothioate
  modified_base 2: mod_base = OTHER; note = 2'-O-methylguanosine-3'-phosphorothioate
  modified_base 3: mod_base = OTHER; note = 2'-O-methylguanosine-3'-phosphate
  modified_base 4: mod_base = OTHER; note = 2'-O-methylguanosine-3'-phosphate
  modified_base 5: mod_base = OTHER; note = 2'-O-methyluridine-3'-phosphate
  modified_base 6: mod_base = OTHER; note = 2'-O-methyladenosine-3'-phosphate
  modified_base 7: mod_base = OTHER; note = 2'-deoxy-2'-fluoroadenosine-3'-phosphate
  modified_base 8: mod_base = OTHER; note = 2'-O-methylcytidine-3'-phosphate
  modified_base 9: mod_base = OTHER; note = 2'-deoxy-2'-fluoroadenosine-3'-phosphate
  modified_base 10: mod_base = OTHER; note = 2'-deoxy-2'-fluoroadenosine-3'-phosphate
  modified_base 11: mod_base = OTHER; note = 2'-deoxy-2'-fluoroguanosine-3'-phosphate
  modified_base 12: mod_base = OTHER; note = 2'-O-methyladenosine-3'-phosphate
  modified_base 13: mod_base = OTHER; note = 2'-O-methyluridine-3'-phosphate
  modified_base 14: mod_base = OTHER; note = 2'-O-methylguanosine-3'-phosphate
  modified_base 15: mod_base = OTHER; note = 2'-O-methyladenosine-3'-phosphate
  modified_base 16: mod_base = OTHER; note = 2'-O-methyluridine-3'-phosphate
  modified_base 17: mod_base = OTHER; note = 2'-O-methyladenosine-3'-phosphate
  modified_base 18: mod_base = OTHER; note = 2'-O-methyladenosine-3'-phosphate
  modified_base 19: mod_base = OTHER; note = 2'-O-methyluridine-3'-phosphate
  modified_base 20: mod_base = OTHER; note = 2'-O-methylcytidine-3'-phosphate
  modified_base 21: mod_base = OTHER; note = 2'-O-methyluridine-3'-phosphate ((2S,4R)-1-[29-[[2-(acetylamino)-2-deoxy-beta-D-galactopyra nosyl]oxy]-14,14-bis[[3-[[3-[[5-[[2-(acetylamino)-2-deoxy-b eta-D-galactopyranosyl]oxy]-1-oxopentyl]amino]propyl]amino] -3-oxopropoxy]methyl]-1,12,19,25-tetraoxo-16-oxa-13,20,24-t riazanonacos-1-yl]-4-hydroxy-2-pyrrolidinyl)methyl ester
ggggtaacaagatgataatct

SEQ ID NO: 1579 - RNA, 21 nt, synthetic construct
  source 1..21: mol_type = other RNA
  modified_base 1: mod_base = OTHER; note = 2'-O-methylcytidine-3'-phosphorothioate
  modified_base 2: mod_base = OTHER; note = 2'-O-methyluridine-3'-phosphorothioate
  modified_base 3: mod_base = OTHER; note = 2'-O-methylcytidine-3'-phosphate
  modified_base 4: mod_base = OTHER; note = 2'-O-methylcytidine-3'-phosphate
  modified_base 5: mod_base = OTHER; note = 2'-O-methyladenosine-3'-phosphate
  modified_base 6: mod_base = OTHER; note = 2'-O-methyluridine-3'-phosphate
  modified_base 7: mod_base = OTHER; note = 2'-deoxy-2'-fluoroguanosine-3'-phosphate
  modified_base 8: mod_base = OTHER; note = 2'-O-methylguanosine-3'-phosphate
  modified_base 9: mod_base = OTHER; note = 2'-deoxy-2'-fluorocytidine-3'-phosphate
  modified_base 10: mod_base = OTHER; note = 2'-deoxy-2'-fluoroguanosine-3'-phosphate
  modified_base 11: mod_base = OTHER; note = 2'-deoxy-2'-fluoroguanosine-3'-phosphate
  modified_base 12: mod_base = OTHER; note = 2'-O-methylguanosine-3'-phosphate
  modified_base 13: mod_base = OTHER; note = 2'-O-methylguanosine-3'-phosphate
  modified_base 14: mod_base = OTHER; note = 2'-O-methylguanosine-3'-phosphate
  modified_base 15: mod_base = OTHER; note = 2'-O-methyluridine-3'-phosphate
  modified_base 16: mod_base = OTHER; note = 2'-O-methyladenosine-3'-phosphate
  modified_base 17: mod_base = OTHER; note = 2'-O-methyladenosine-3'-phosphate
  modified_base 18: mod_base = OTHER; note = 2'-O-methylcytidine-3'-phosphate
  modified_base 19: mod_base = OTHER; note = 2'-O-methyladenosine-3'-phosphate
  modified_base 20: mod_base = OTHER; note = 2'-O-methyladenosine-3'-phosphate
  modified_base 21: mod_base = OTHER; note = 2'-O-methyladenosine-3'-phosphate ((2S,4R)-1-[29-[[2-(acetylamino)-2-deoxy-beta-D-galactopyra nosyl]oxy]-14,14-bis[[3-[[3-[[5-[[2-(acetylamino)-2-deoxy-b eta-D-galactopyranosyl]oxy]-1-oxopentyl]amino]propyl]amino] -3-oxopropoxy]methyl]-1,12,19,25-tetraoxo-16-oxa-13,20,24-t riazanonacos-1-yl]-4-hydroxy-2-pyrrolidinyl)methyl ester
ctccatggcgggggtaacaaa

SEQ ID NO: 1580 - RNA, 21 nt, synthetic construct
  source 1..21: mol_type = other RNA
  modified_base 1: mod_base = OTHER; note = 2'-O-methyluridine-3'-phosphorothioate
  modified_base 2: mod_base = OTHER; note = 2'-O-methyladenosine-3'-phosphorothioate
  modified_base 3: mod_base = OTHER; note = 2'-O-methylguanosine-3'-phosphate
  modified_base 4: mod_base = OTHER; note = 2'-O-methylguanosine-3'-phosphate
  modified_base 5: mod_base = OTHER; note = 2'-O-methyladenosine-3'-phosphate
  modified_base 6: mod_base = OTHER; note = 2'-O-methyluridine-3'-phosphate
  modified_base 7: mod_base = OTHER; note = 2'-O-methyladenosine-3'-phosphate
  modified_base 8: mod_base = OTHER; note = 2'-O-methyladenosine-3'-phosphate
  modified_base 9: mod_base = OTHER; note = 2'-deoxy-2'-fluorouridine-3'-phosphate
  modified_base 10: mod_base = OTHER; note = 2'-deoxy-2'-fluoroguanosine-3'-phosphate
  modified_base 11: mod_base = OTHER; note = 2'-deoxy-2'-fluorouridine-3'-phosphate
  modified_base 12: mod_base = OTHER; note = 2'-O-methylcytidine-3'-phosphate
  modified_base 13: mod_base = OTHER; note = 2'-O-methyluridine-3'-phosphate
  modified_base 14: mod_base = OTHER; note = 2'-O-methyluridine-3'-phosphate
  modified_base 15: mod_base = OTHER; note = 2'-O-methyladenosine-3'-phosphate
  modified_base 16: mod_base = OTHER; note = 2'-O-methyluridine-3'-phosphate
  modified_base 17: mod_base = OTHER; note = 2'-O-methylguanosine-3'-phosphate
  modified_base 18: mod_base = OTHER; note = 2'-O-methyluridine-3'-phosphate
  modified_base 19: mod_base = OTHER; note = 2'-O-methyladenosine-3'-phosphate
  modified_base 20: mod_base = OTHER; note = 2'-O-methyladenosine-3'-phosphate
  modified_base 21: mod_base = OTHER; note = 2'-O-methyluridine-3'-phosphate ((2S,4R)-1-[29-[[2-(acetylamino)-2-deoxy-beta-D-galactopyra nosyl]oxy]-14,14-bis[[3-[[3-[[5-[[2-(acetylamino)-2-deoxy-b eta-D-galactopyranosyl]oxy]-1-oxopentyl]amino]propyl]amino] -3-oxopropoxy]methyl]-1,12,19,25-tetraoxo-16-oxa-13,20,24-t riazanonacos-1-yl]-4-hydroxy-2-pyrrolidinyl)methyl ester
taggataatgtcttatgtaat

SEQ ID NO: 1581 - RNA, 21 nt, synthetic construct
  source 1..21: mol_type = other RNA
  modified_base 1: mod_base = OTHER; note = 2'-O-methylcytidine-3'-phosphorothioate
  modified_base 2: mod_base = OTHER; note = 2'-O-methylcytidine-3'-phosphorothioate
  modified_base 3: mod_base = OTHER; note = 2'-O-methyluridine-3'-phosphate
  modified_base 4: mod_base = OTHER; note = 2'-O-methyladenosine-3'-phosphate
  modified_base 5: mod_base = OTHER; note = 2'-O-methyladenosine-3'-phosphate
  modified_base 6: mod_base = OTHER; note = 2'-O-methylcytidine-3'-phosphate
  modified_base 7: mod_base = OTHER; note = 2'-O-methyluridine-3'-phosphate
  modified_base 8: mod_base = OTHER; note = 2'-O-methyladenosine-3'-phosphate
  modified_base 9: mod_base = OTHER; note = 2'-deoxy-2'-fluoroadenosine-3'-phosphate
  modified_base 10: mod_base = OTHER; note = 2'-deoxy-2'-fluoroadenosine-3'-phosphate
  modified_base 11: mod_base = OTHER; note = 2'-deoxy-2'-fluoroadenosine-3'-phosphate
  modified_base 12: mod_base = OTHER; note = 2'-O-methyluridine-3'-phosphate
  modified_base 13: mod_base = OTHER; note = 2'-O-methyladenosine-3'-phosphate
  modified_base 14: mod_base = OTHER; note = 2'-O-methyladenosine-3'-phosphate
  modified_base 15: mod_base = OTHER; note = 2'-O-methyluridine-3'-phosphate
  modified_base 16: mod_base = OTHER; note = 2'-O-methylguanosine-3'-phosphate
  modified_base 17: mod_base = OTHER; note = 2'-O-methyluridine-3'-phosphate
  modified_base 18: mod_base = OTHER; note = 2'-O-methyluridine-3'-phosphate
  modified_base 19: mod_base = OTHER; note = 2'-O-methyluridine-3'-phosphate
  modified_base 20: mod_base = OTHER; note = 2'-O-methyladenosine-3'-phosphate
  modified_base 21: mod_base = OTHER; note = 2'-O-methyladenosine-3'-phosphate ((2S,4R)-1-[29-[[2-(acetylamino)-2-deoxy-beta-D-galactopyra nosyl]oxy]-14,14-bis[[3-[[3-[[5-[[2-(acetylamino)-2-deoxy-b eta-D-galactopyranosyl]oxy]-1-oxopentyl]amino]propyl]amino] -3-oxopropoxy]methyl]-1,12,19,25-tetraoxo-16-oxa-13,20,24-t riazanonacos-1-yl]-4-hydroxy-2-pyrrolidinyl)methyl ester
cctaactaaaataatgtttaa

SEQ ID NO: 1582 - RNA, 21 nt, synthetic construct
  source 1..21: mol_type = other RNA
  modified_base 1: mod_base = OTHER; note = 2'-O-methyladenosine-3'-phosphorothioate
  modified_base 2: mod_base = OTHER; note = 2'-O-methyluridine-3'-phosphorothioate
  modified_base 3: mod_base = OTHER; note = 2'-O-methylguanosine-3'-phosphate
  modified_base 4: mod_base = OTHER; note = 2'-O-methyluridine-3'-phosphate
  modified_base 5: mod_base = OTHER; note = 2'-O-methyluridine-3'-phosphate
  modified_base 6: mod_base = OTHER; note = 2'-O-methyladenosine-3'-phosphate
  modified_base 7: mod_base = OTHER; note = 2'-O-methylguanosine-3'-phosphate
  modified_base 8: mod_base = OTHER; note = 2'-O-methyluridine-3'-phosphate
  modified_base 9: mod_base = OTHER; note = 2'-deoxy-2'-fluoroadenosine-3'-phosphate
  modified_base 10: mod_base = OTHER; note = 2'-deoxy-2'-fluoroguanosine-3'-phosphate
  modified_base 11: mod_base = OTHER; note = 2'-deoxy-2'-fluoroadenosine-3'-phosphate
  modified_base 12: mod_base = OTHER; note = 2'-O-methyladenosine-3'-phosphate
  modified_base 13: mod_base = OTHER; note = 2'-O-methyluridine-3'-phosphate
  modified_base 14: mod_base = OTHER; note = 2'-O-methyladenosine-3'-phosphate
  modified_base 15: mod_base = OTHER; note = 2'-O-methyladenosine-3'-phosphate
  modified_base 16: mod_base = OTHER; note = 2'-O-methylguanosine-3'-phosphate
  modified_base 17: mod_base = OTHER; note = 2'-O-methylcytidine-3'-phosphate
  modified_base 18: mod_base = OTHER; note = 2'-O-methylcytidine-3'-phosphate
  modified_base 19: mod_base = OTHER; note = 2'-O-methyluridine-3'-phosphate
  modified_base 20: mod_base = OTHER; note = 2'-O-methyluridine-3'-phosphate
  modified_base 21: mod_base = OTHER; note = 2'-O-methyladenosine-3'-phosphate ((2S,4R)-1-[29-[[2-(acetylamino)-2-deoxy-beta-D-galactopyra nosyl]oxy]-14,14-bis[[3-[[3-[[5-[[2-(acetylamino)-2-deoxy-b eta-D-galactopyranosyl]oxy]-1-oxopentyl]amino]propyl]amino] -3-oxopropoxy]methyl]-1,12,19,25-tetraoxo-16-oxa-13,20,24-t riazanonacos-1-yl]-4-hydroxy-2-pyrrolidinyl)methyl ester
atgttagtagaataagcctta

SEQ ID NO: 1583 - RNA, 21 nt, synthetic construct
  source 1..21: mol_type = other RNA
  modified_base 1: mod_base = OTHER; note = 2'-O-methylcytidine-3'-phosphorothioate
  modified_base 2: mod_base = OTHER; note = 2'-O-methyladenosine-3'-phosphorothioate
  modified_base 3: mod_base = OTHER; note = 2'-O-methylcytidine-3'-phosphate
  modified_base 4: mod_base = OTHER; note = 2'-O-methylcytidine-3'-phosphate
  modified_base 5: mod_base = OTHER; note = 2'-O-methyluridine-3'-phosphate
  modified_base 6: mod_base = OTHER; note = 2'-O-methyluridine-3'-phosphate
  modified_base 7: mod_base = OTHER; note = 2'-O-methyluridine-3'-phosphate
  modified_base 8: mod_base = OTHER; note = 2'-O-methyluridine-3'-phosphate
  modified_base 9: mod_base = OTHER; note = 2'-deoxy-2'-fluorouridine-3'-phosphate
  modified_base 10: mod_base = OTHER; note = 2'-deoxy-2'-fluorocytidine-3'-phosphate
  modified_base 11: mod_base = OTHER; note = 2'-deoxy-2'-fluoroadenosine-3'-phosphate
  modified_base 12: mod_base = OTHER; note = 2'-O-methylcytidine-3'-phosphate
  modified_base 13: mod_base = OTHER; note = 2'-O-methylcytidine-3'-phosphate
  modified_base 14: mod_base = OTHER; note = 2'-O-methyluridine-3'-phosphate
  modified_base 15: mod_base = OTHER; note = 2'-O-methyladenosine-3'-phosphate
  modified_base 16: mod_base = OTHER; note = 2'-O-methyladenosine-3'-phosphate
  modified_base 17: mod_base = OTHER; note = 2'-O-methylcytidine-3'-phosphate
  modified_base 18: mod_base = OTHER; note = 2'-O-methyluridine-3'-phosphate
  modified_base 19: mod_base = OTHER; note = 2'-O-methyladenosine-3'-phosphate
  modified_base 20: mod_base = OTHER; note = 2'-O-methyladenosine-3'-phosphate
  modified_base 21: mod_base = OTHER; note = 2'-O-methyladenosine-3'-phosphate ((2S,4R)-1-[29-[[2-(acetylamino)-2-deoxy-beta-D-galactopyra nosyl]oxy]-14,14-bis[[3-[[3-[[5-[[2-(acetylamino)-2-deoxy-b eta-D-galactopyranosyl]oxy]-1-oxopentyl]amino]propyl]amino] -3-oxopropoxy]methyl]-1,12,19,25-tetraoxo-16-oxa-13,20,24-t riazanonacos-1-yl]-4-hydroxy-2-pyrrolidinyl)methyl ester
cacctttttcacctaactaaa

SEQ ID NO: 1584 - RNA, 21 nt, synthetic construct
  source 1..21: mol_type = other RNA
  modified_base 1: mod_base = OTHER; note = 2'-O-methyluridine-3'-phosphorothioate
  modified_base 2: mod_base = OTHER; note = 2'-O-methylguanosine-3'-phosphorothioate
  modified_base 3: mod_base = OTHER; note = 2'-O-methyladenosine-3'-phosphate
  modified_base 4: mod_base = OTHER; note = 2'-O-methylguanosine-3'-phosphate
  modified_base 5: mod_base = OTHER; note = 2'-O-methyluridine-3'-phosphate
  modified_base 6: mod_base = OTHER; note = 2'-O-methylguanosine-3'-phosphate
  modified_base 7: mod_base = OTHER; note = 2'-O-methyladenosine-3'-phosphate
  modified_base 8: mod_base = OTHER; note = 2'-O-methyladenosine-3'-phosphate
  modified_base 9: mod_base = OTHER; note = 2'-deoxy-2'-fluoroguanosine-3'-phosphate
  modified_base 10: mod_base = OTHER; note = 2'-deoxy-2'-fluoroadenosine-3'-phosphate
  modified_base 11: mod_base = OTHER; note = 2'-deoxy-2'-fluoroadenosine-3'-phosphate
  modified_base 12: mod_base = OTHER; note = 2'-O-methyladenosine-3'-phosphate
  modified_base 13: mod_base = OTHER; note = 2'-O-methyluridine-3'-phosphate
  modified_base 14: mod_base = OTHER; note = 2'-O-methylguanosine-3'-phosphate
  modified_base 15: mod_base = OTHER; note = 2'-O-methyladenosine-3'-phosphate
  modified_base 16: mod_base = OTHER; note = 2'-O-methyladenosine-3'-phosphate
  modified_base 17: mod_base = OTHER; note = 2'-O-methyladenosine-3'-phosphate
  modified_base 18: mod_base = OTHER; note = 2'-O-methylguanosine-3'-phosphate
  modified_base 19: mod_base = OTHER; note = 2'-O-methyladenosine-3'-phosphate
  modified_base 20: mod_base = OTHER; note = 2'-O-methylcytidine-3'-phosphate
  modified_base 21: mod_base = OTHER; note = 2'-O-methyladenosine-3'-phosphate ((2S,4R)-1-[29-[[2-(acetylamino)-2-deoxy-beta-D-galactopyra nosyl]oxy]-14,14-bis[[3-[[3-[[5-[[2-(acetylamino)-2-deoxy-b eta-D-galactopyranosyl]oxy]-1-oxopentyl]amino]propyl]amino] -3-oxopropoxy]methyl]-1,12,19,25-tetraoxo-16-oxa-13,20,24-t riazanonacos-1-yl]-4-hydroxy-2-pyrrolidinyl)methyl ester
tgagtgaagaaatgaaagaca

SEQ ID NO: 1585 - RNA, 21 nt, synthetic construct
  source 1..21: mol_type = other RNA
  modified_base 1: mod_base = OTHER; note = 2'-O-methyladenosine-3'-phosphorothioate
  modified_base 2: mod_base = OTHER; note = 2'-O-methylcytidine-3'-phosphorothioate
  modified_base 3: mod_base = OTHER; note = 2'-O-methylcytidine-3'-phosphate
  modified_base 4: mod_base = OTHER; note = 2'-O-methyluridine-3'-phosphate
  modified_base 5: mod_base = OTHER; note = 2'-O-methyladenosine-3'-phosphate
  modified_base 6: mod_base = OTHER; note = 2'-O-methyladenosine-3'-phosphate
  modified_base 7: mod_base = OTHER; note = 2'-O-methylcytidine-3'-phosphate
  modified_base 8: mod_base = OTHER; note = 2'-O-methyluridine-3'-phosphate
  modified_base 9: mod_base = OTHER; note = 2'-deoxy-2'-fluoroadenosine-3'-phosphate
  modified_base 10: mod_base = OTHER; note = 2'-deoxy-2'-fluoroadenosine-3'-phosphate
  modified_base 11: mod_base = OTHER; note = 2'-deoxy-2'-fluoroadenosine-3'-phosphate
  modified_base 12: mod_base = OTHER; note = 2'-O-methyladenosine-3'-phosphate
  modified_base 13: mod_base = OTHER; note = 2'-O-methyluridine-3'-phosphate
  modified_base 14: mod_base = OTHER; note = 2'-O-methyladenosine-3'-phosphate
  modified_base 15: mod_base = OTHER; note = 2'-O-methyladenosine-3'-phosphate
  modified_base 16: mod_base = OTHER; note = 2'-O-methyluridine-3'-phosphate
  modified_base 17: mod_base = OTHER; note = 2'-O-methylguanosine-3'-phosphate
  modified_base 18: mod_base = OTHER; note = 2'-O-methyluridine-3'-phosphate
  modified_base 19: mod_base = OTHER; note = 2'-O-methyluridine-3'-phosphate
  modified_base 20: mod_base = OTHER; note = 2'-O-methyluridine-3'-phosphate
  modified_base 21: mod_base = OTHER; note = 2'-O-methyladenosine-3'-phosphate ((2S,4R)-1-[29-[[2-(acetylamino)-2-deoxy-beta-D-galactopyra nosyl]oxy]-14,14-bis[[3-[[3-[[5-[[2-(acetylamino)-2-deoxy-b eta-D-galactopyranosyl]oxy]-1-oxopentyl]amino]propyl]amino] -3-oxopropoxy]methyl]-1,12,19,25-tetraoxo-16-oxa-13,20,24-t riazanonacos-1-yl]-4-hydroxy-2-pyrrolidinyl)methyl ester
acctaactaaaataatgttta

SEQ ID NO: 1586 - RNA, 21 nt, synthetic construct
  source 1..21: mol_type = other RNA
  modified_base 1: mod_base = OTHER; note = 2'-O-methyluridine-3'-phosphorothioate
  modified_base 2: mod_base = OTHER; note = 2'-O-methyluridine-3'-phosphorothioate
  modified_base 3: mod_base = OTHER; note = 2'-O-methyluridine-3'-phosphate
  modified_base 4: mod_base = OTHER; note = 2'-O-methyluridine-3'-phosphate
  modified_base 5: mod_base = OTHER; note = 2'-O-methyluridine-3'-phosphate
  modified_base 6: mod_base = OTHER; note = 2'-O-methylcytidine-3'-phosphate
  modified_base 7: mod_base = OTHER; note = 2'-O-methyladenosine-3'-phosphate
  modified_base 8: mod_base = OTHER; note = 2'-O-methylcytidine-3'-phosphate
  modified_base 9: mod_base = OTHER; note = 2'-deoxy-2'-fluorocytidine-3'-phosphate
  modified_base 10: mod_base = OTHER; note = 2'-deoxy-2'-fluorouridine-3'-phosphate
  modified_base 11: mod_base = OTHER; note = 2'-deoxy-2'-fluoroadenosine-3'-phosphate
  modified_base 12: mod_base = OTHER; note = 2'-O-methyladenosine-3'-phosphate
  modified_base 13: mod_base = OTHER; note = 2'-O-methylcytidine-3'-phosphate
  modified_base 14: mod_base = OTHER; note = 2'-O-methyluridine-3'-phosphate
  modified_base 15: mod_base = OTHER; note = 2'-O-methyladenosine-3'-phosphate
  modified_base 16: mod_base = OTHER; note = 2'-O-methyladenosine-3'-phosphate
  modified_base 17: mod_base = OTHER; note = 2'-O-methyladenosine-3'-phosphate
  modified_base 18: mod_base = OTHER; note = 2'-O-methyladenosine-3'-phosphate
  modified_base 19: mod_base = OTHER; note = 2'-O-methyluridine-3'-phosphate
  modified_base 20: mod_base = OTHER; note = 2'-O-methyladenosine-3'-phosphate
  modified_base 21: mod_base = OTHER; note = 2'-O-methyladenosine-3'-phosphate ((2S,4R)-1-[29-[[2-(acetylamino)-2-deoxy-beta-D-galactopyra nosyl]oxy]-14,14-bis[[3-[[3-[[5-[[2-(acetylamino)-2-deoxy-b eta-D-galactopyranosyl]oxy]-1-oxopentyl]amino]propyl]amino] -3-oxopropoxy]methyl]-1,12,19,25-tetraoxo-16-oxa-13,20,24-t riazanonacos-1-yl]-4-hydroxy-2-pyrrolidinyl)methyl ester
tttttcacctaactaaaataa

SEQ ID NO: 1587 - RNA, 21 nt, synthetic construct
  source 1..21: mol_type = other RNA
  modified_base 1: mod_base = OTHER; note = 2'-O-methylguanosine-3'-phosphorothioate
  modified_base 2: mod_base = OTHER; note = 2'-O-methyladenosine-3'-phosphorothioate
  modified_base 3: mod_base = OTHER; note = 2'-O-methyluridine-3'-phosphate
  modified_base 4: mod_base = OTHER; note = 2'-O-methyluridine-3'-phosphate
  modified_base 5: mod_base = OTHER; note = 2'-O-methyluridine-3'-phosphate
  modified_base 6: mod_base = OTHER; note = 2'-O-methylguanosine-3'-phosphate
  modified_base 7: mod_base = OTHER; note = 2'-O-methylcytidine-3'-phosphate
  modified_base 8: mod_base = OTHER; note = 2'-O-methyladenosine-3'-phosphate
  modified_base 9: mod_base = OTHER; note = 2'-deoxy-2'-fluoroadenosine-3'-phosphate
  modified_base 10: mod_base = OTHER; note = 2'-deoxy-2'-fluorocytidine-3'-phosphate
  modified_base 11: mod_base = OTHER; note = 2'-deoxy-2'-fluorouridine-3'-phosphate
  modified_base 12: mod_base = OTHER; note = 2'-O-methyluridine-3'-phosphate
  modified_base 13: mod_base = OTHER; note = 2'-O-methylguanosine-3'-phosphate
  modified_base 14: mod_base = OTHER; note = 2'-O-methylcytidine-3'-phosphate
  modified_base 15: mod_base = OTHER; note = 2'-O-methyluridine-3'-phosphate
  modified_base 16: mod_base = OTHER; note = 2'-O-methyladenosine-3'-phosphate
  modified_base 17: mod_base = OTHER; note = 2'-O-methylcytidine-3'-phosphate
  modified_base 18: mod_base = OTHER; note = 2'-O-methylcytidine-3'-phosphate
  modified_base 19: mod_base = OTHER; note = 2'-O-methylcytidine-3'-phosphate
  modified_base 20: mod_base = OTHER; note = 2'-O-methyladenosine-3'-phosphate
  modified_base 21: mod_base = OTHER; note = 2'-O-methyluridine-3'-phosphate ((2S,4R)-1-[29-[[2-(acetylamino)-2-deoxy-beta-D-galactopyra nosyl]oxy]-14,14-bis[[3-[[3-[[5-[[2-(acetylamino)-2-deoxy-b eta-D-galactopyranosyl]oxy]-1-oxopentyl]amino]propyl]amino] -3-oxopropoxy]methyl]-1,12,19,25-tetraoxo-16-oxa-13,20,24-t riazanonacos-1-yl]-4-hydroxy-2-pyrrolidinyl)methyl ester
gatttgcaacttgctacccat

SEQ ID NO: 1588 - RNA, 21 nt, synthetic construct
  source 1..21: mol_type = other RNA
  modified_base 1: mod_base = OTHER; note = 2'-O-methyladenosine-3'-phosphorothioate
  modified_base 2: mod_base = OTHER; note = 2'-O-methyluridine-3'-phosphorothioate
  modified_base 3: mod_base = OTHER; note = 2'-O-methyladenosine-3'-phosphate
  modified_base 4: mod_base = OTHER; note = 2'-O-methyladenosine-3'-phosphate
  modified_base 5: mod_base = OTHER; note = 2'-O-methyluridine-3'-phosphate
  modified_base 6: mod_base = OTHER; note = 2'-O-methylguanosine-3'-phosphate
  modified_base 7: mod_base = OTHER; note = 2'-O-methyluridine-3'-phosphate
  modified_base 8: mod_base = OTHER; note = 2'-O-methylcytidine-3'-phosphate
  modified_base 9: mod_base = OTHER; note = 2'-deoxy-2'-fluorouridine-3'-phosphate
  modified_base 10: mod_base = OTHER; note = 2'-deoxy-2'-fluorouridine-3'-phosphate
  modified_base 11: mod_base = OTHER; note = 2'-deoxy-2'-fluoroadenosine-3'-phosphate
  modified_base 12: mod_base = OTHER; note = 2'-O-methyluridine-3'-phosphate
  modified_base 13: mod_base = OTHER; note = 2'-O-methylguanosine-3'-phosphate
  modified_base 14: mod_base = OTHER; note = 2'-O-methyluridine-3'-phosphate
  modified_base 15: mod_base = OTHER; note = 2'-O-methyladenosine-3'-phosphate
  modified_base 16: mod_base = OTHER; note = 2'-O-methyladenosine-3'-phosphate
  modified_base 17: mod_base = OTHER; note = 2'-O-methyluridine-3'-phosphate
  modified_base 18: mod_base = OTHER; note = 2'-O-methylguanosine-3'-phosphate
  modified_base 19: mod_base = OTHER; note = 2'-O-methylcytidine-3'-phosphate
  modified_base 20: mod_base = OTHER; note = 2'-O-methyluridine-3'-phosphate
  modified_base 21: mod_base = OTHER; note = 2'-O-methyluridine-3'-phosphate ((2S,4R)-1-[29-[[2-(acetylamino)-2-deoxy-beta-D-galactopyra nosyl]oxy]-14,14-bis[[3-[[3-[[5-[[2-(acetylamino)-2-deoxy-b eta-D-galactopyranosyl]oxy]-1-oxopentyl]amino]propyl]amino] -3-oxopropoxy]methyl]-1,12,19,25-tetraoxo-16-oxa-13,20,24-t riazanonacos-1-yl]-4-hydroxy-2-pyrrolidinyl)methyl ester
ataatgtcttatgtaatgctt

SEQ ID NO: 1589 - RNA, 21 nt, synthetic construct
  source 1..21: mol_type = other RNA
  modified_base 1: mod_base = OTHER; note = 2'-O-methyladenosine-3'-phosphorothioate
  modified_base 2: mod_base = OTHER; note = 2'-O-methyladenosine-3'-phosphorothioate
  modified_base 3: mod_base = OTHER; note = 2'-O-methylcytidine-3'-phosphate
  modified_base 4: mod_base = OTHER; note = 2'-O-methyluridine-3'-phosphate
  modified_base 5: mod_base = OTHER; note = 2'-O-methyluridine-3'-phosphate
  modified_base 6: mod_base = OTHER; note = 2'-O-methylguanosine-3'-phosphate
  modified_base 7: mod_base = OTHER; note = 2'-O-methylcytidine-3'-phosphate
  modified_base 8: mod_base = OTHER; note = 2'-O-methyluridine-3'-phosphate
  modified_base 9: mod_base = OTHER; note = 2'-deoxy-2'-fluoroadenosine-3'-phosphate
  modified_base 10: mod_base = OTHER; note = 2'-deoxy-2'-fluorocytidine-3'-phosphate
  modified_base 11: mod_base = OTHER; note = 2'-deoxy-2'-fluorocytidine-3'-phosphate
  modified_base 12: mod_base = OTHER; note = 2'-O-methylcytidine-3'-phosphate
  modified_base 13: mod_base = OTHER; note = 2'-O-methyladenosine-3'-phosphate
  modified_base 14: mod_base = OTHER; note = 2'-O-methyluridine-3'-phosphate
  modified_base 15: mod_base = OTHER; note = 2'-O-methyluridine-3'-phosphate
  modified_base 16: mod_base = OTHER; note = 2'-O-methyladenosine-3'-phosphate
  modified_base 17: mod_base = OTHER; note = 2'-O-methylguanosine-3'-phosphate
  modified_base 18: mod_base = OTHER; note = 2'-O-methylguanosine-3'-phosphate
  modified_base 19: mod_base = OTHER; note = 2'-O-methyladenosine-3'-phosphate
  modified_base 20: mod_base = OTHER; note = 2'-O-methyluridine-3'-phosphate
  modified_base 21: mod_base = OTHER; note = 2'-O-methyladenosine-3'-phosphate ((2S,4R)-1-[29-[[2-(acetylamino)-2-deoxy-beta-D-galactopyra nosyl]oxy]-14,14-bis[[3-[[3-[[5-[[2-(acetylamino)-2-deoxy-b eta-D-galactopyranosyl]oxy]-1-oxopentyl]amino]propyl]amino] -3-oxopropoxy]methyl]-1,12,19,25-tetraoxo-16-oxa-13,20,24-t riazanonacos-1-yl]-4-hydroxy-2-pyrrolidinyl)methyl ester
aacttgctacccattaggata

SEQ ID NO: 1590 - RNA, 21 nt, synthetic construct
  source 1..21: mol_type = other RNA
  modified_base 1: mod_base = OTHER; note = 2'-O-methylcytidine-3'-phosphorothioate
  modified_base 2: mod_base = OTHER; note = 2'-O-methyluridine-3'-phosphorothioate
  modified_base 3: mod_base = OTHER; note = 2'-O-methylguanosine-3'-phosphate
  modified_base 4: mod_base = OTHER; note = 2'-O-methyladenosine-3'-phosphate
  modified_base 5: mod_base = OTHER; note = 2'-O-methylguanosine-3'-phosphate
  modified_base 6: mod_base = OTHER; note = 2'-O-methyluridine-3'-phosphate
  modified_base 7: mod_base = OTHER; note = 2'-O-methyluridine-3'-phosphate
  modified_base 8: mod_base = OTHER; note = 2'-O-methylguanosine-3'-phosphate
  modified_base 9: mod_base = OTHER; note = 2'-deoxy-2'-fluoroguanosine-3'-phosphate
  modified_base 10: mod_base = OTHER; note = 2'-deoxy-2'-fluorouridine-3'-phosphate
  modified_base 11: mod_base = OTHER; note = 2'-deoxy-2'-fluorouridine-3'-phosphate
  modified_base 12: mod_base = OTHER; note = 2'-O-methyluridine-3'-phosphate
  modified_base 13: mod_base = OTHER; note = 2'-O-methyluridine-3'-phosphate
  modified_base 14: mod_base = OTHER; note = 2'-O-methyladenosine-3'-phosphate
  modified_base 15: mod_base = OTHER; note = 2'-O-methyluridine-3'-phosphate
  modified_base 16: mod_base = OTHER; note = 2'-O-methylguanosine-3'-phosphate
  modified_base 17: mod_base = OTHER; note = 2'-O-methyladenosine-3'-phosphate
  modified_base 18: mod_base = OTHER; note = 2'-O-methyladenosine-3'-phosphate
  modified_base 19: mod_base = OTHER; note = 2'-O-methyladenosine-3'-phosphate
  modified_base 20: mod_base = OTHER; note = 2'-O-methyladenosine-3'-phosphate
  modified_base 21: mod_base = OTHER; note = 2'-O-methyluridine-3'-phosphate ((2S,4R)-1-[29-[[2-(acetylamino)-2-deoxy-beta-D-galactopyra nosyl]oxy]-14,14-bis[[3-[[3-[[5-[[2-(acetylamino)-2-deoxy-b eta-D-galactopyranosyl]oxy]-1-oxopentyl]amino]propyl]amino] -3-oxopropoxy]methyl]-1,12,19,25-tetraoxo-16-oxa-13,20,24-t riazanonacos-1-yl]-4-hydroxy-2-pyrrolidinyl)methyl ester
ctgagttggttttatgaaaat

SEQ ID NO: 1591 - RNA, 21 nt, synthetic construct
  source 1..21: mol_type = other RNA
  modified_base 1: mod_base = OTHER; note = 2'-O-methyladenosine-3'-phosphorothioate
  modified_base 2: mod_base = OTHER; note = 2'-O-methylcytidine-3'-phosphorothioate
  modified_base 3: mod_base = OTHER; note = 2'-O-methylcytidine-3'-phosphate
  modified_base 4: mod_base = OTHER; note = 2'-O-methyluridine-3'-phosphate
  modified_base 5: mod_base = OTHER; note = 2'-O-methylguanosine-3'-phosphate
  modified_base 6: mod_base = OTHER; note = 2'-O-methyluridine-3'-phosphate
  modified_base 7: mod_base = OTHER; note = 2'-O-methyluridine-3'-phosphate
  modified_base 8: mod_base = OTHER; note = 2'-O-methylguanosine-3'-phosphate
  modified_base 9: mod_base = OTHER; note = 2'-deoxy-2'-fluoroadenosine-3'-phosphate
  modified_base 10: mod_base = OTHER; note = 2'-deoxy-2'-fluoroadenosine-3'-phosphate
  modified_base 11: mod_base = OTHER; note = 2'-deoxy-2'-fluorouridine-3'-phosphate
  modified_base 12: mod_base = OTHER; note = 2'-O-methyluridine-3'-phosphate
  modified_base 13: mod_base = OTHER; note = 2'-O-methyluridine-3'-phosphate
  modified_base 14: mod_base = OTHER; note = 2'-O-methyluridine-3'-phosphate
  modified_base 15: mod_base = OTHER; note = 2'-O-methylguanosine-3'-phosphate
  modified_base 16: mod_base = OTHER; note = 2'-O-methyluridine-3'-phosphate
  modified_base 17: mod_base = OTHER; note = 2'-O-methyladenosine-3'-phosphate
  modified_base 18: mod_base = OTHER; note = 2'-O-methyluridine-3'-phosphate
  modified_base 19: mod_base = OTHER; note = 2'-O-methyluridine-3'-phosphate
  modified_base 20: mod_base = OTHER; note = 2'-O-methyladenosine-3'-phosphate
  modified_base 21: mod_base = OTHER; note = 2'-O-methyluridine-3'-phosphate ((2S,4R)-1-[29-[[2-(acetylamino)-2-deoxy-beta-D-galactopyra nosyl]oxy]-14,14-bis[[3-[[3-[[5-[[2-(acetylamino)-2-deoxy-b eta-D-galactopyranosyl]oxy]-1-oxopentyl]amino]propyl]amino] -3-oxopropoxy]methyl]-1,12,19,25-tetraoxo-16-oxa-13,20,24-t riazanonacos-1-yl]-4-hydroxy-2-pyrrolidinyl)methyl ester
acctgttgaattttgtattat

SEQ ID NO: 1592 - RNA, 21 nt, synthetic construct
  source 1..21: mol_type = other RNA
  modified_base 1: mod_base = OTHER; note = 2'-O-methyluridine-3'-phosphorothioate
  modified_base 2: mod_base = OTHER; note = 2'-O-methyluridine-3'-phosphorothioate
  modified_base 3: mod_base = OTHER; note = 2'-O-methyluridine-3'-phosphate
  modified_base 4: mod_base = OTHER; note = 2'-O-methyluridine-3'-phosphate
  modified_base 5: mod_base = OTHER; note = 2'-O-methyladenosine-3'-phosphate
  modified_base 6: mod_base = OTHER; note = 2'-O-methylguanosine-3'-phosphate
  modified_base 7: mod_base = OTHER; note = 2'-O-methyladenosine-3'-phosphate
  modified_base 8: mod_base = OTHER; note = 2'-O-methyladenosine-3'-phosphate
  modified_base 9: mod_base = OTHER; note = 2'-deoxy-2'-fluorocytidine-3'-phosphate
  modified_base 10: mod_base = OTHER; note = 2'-deoxy-2'-fluoroadenosine-3'-phosphate
  modified_base 11: mod_base = OTHER; note = 2'-deoxy-2'-fluorocytidine-3'-phosphate
  modified_base 12: mod_base = OTHER; note = 2'-O-methylcytidine-3'-phosphate
  modified_base 13: mod_base = OTHER; note = 2'-O-methyluridine-3'-phosphate
  modified_base 14: mod_base = OTHER; note = 2'-O-methyluridine-3'-phosphate
  modified_base 15: mod_base = OTHER; note = 2'-O-methyluridine-3'-phosphate
  modified_base 16: mod_base = OTHER; note = 2'-O-methyluridine-3'-phosphate
  modified_base 17: mod_base = OTHER; note = 2'-O-methyluridine-3'-phosphate
  modified_base 18: mod_base = OTHER; note = 2'-O-methylcytidine-3'-phosphate
  modified_base 19: mod_base = OTHER; note = 2'-O-methyladenosine-3'-phosphate
  modified_base 20: mod_base = OTHER; note = 2'-O-methylcytidine-3'-phosphate
  modified_base 21: mod_base = OTHER; note = 2'-O-methyluridine-3'-phosphate ((2S,4R)-1-[29-[[2-(acetylamino)-2-deoxy-beta-D-galactopyra nosyl]oxy]-14,14-bis[[3-[[3-[[5-[[2-(acetylamino)-2-deoxy-b eta-D-galactopyranosyl]oxy]-1-oxopentyl]amino]propyl]amino] -3-oxopropoxy]methyl]-1,12,19,25-tetraoxo-16-oxa-13,20,24-t riazanonacos-1-yl]-4-hydroxy-2-pyrrolidinyl)methyl ester
ttttagaacacctttttcact

SEQ ID NO: 1593 - RNA, 21 nt, synthetic construct
  source 1..21: mol_type = other RNA
  modified_base 1: mod_base = OTHER; note = 2'-O-methyladenosine-3'-phosphorothioate
  modified_base 2: mod_base = OTHER; note = 2'-O-methyluridine-3'-phosphorothioate
  modified_base 3: mod_base = OTHER; note = 2'-O-methyladenosine-3'-phosphate
  modified_base 4: mod_base = OTHER; note = 2'-O-methylcytidine-3'-phosphate
  modified_base 5: mod_base = OTHER; note = 2'-O-methyladenosine-3'-phosphate
  modified_base 6: mod_base = OTHER; note = 2'-O-methyluridine-3'-phosphate
  modified_base 7: mod_base = OTHER; note = 2'-O-methylguanosine-3'-phosphate
  modified_base 8: mod_base = OTHER; note = 2'-O-methyladenosine-3'-phosphate
  modified_base 9: mod_base = OTHER; note = 2'-deoxy-2'-fluoroguanosine-3'-phosphate
  modified_base 10: mod_base = OTHER; note = 2'-deoxy-2'-fluorocytidine-3'-phosphate
  modified_base 11: mod_base = OTHER; note = 2'-deoxy-2'-fluoroadenosine-3'-phosphate
  modified_base 12: mod_base = OTHER; note = 2'-O-methyladenosine-3'-phosphate
  modified_base 13: mod_base = OTHER; note = 2'-O-methylguanosine-3'-phosphate
  modified_base 14: mod_base = OTHER; note = 2'-O-methyladenosine-3'-phosphate
  modified_base 15: mod_base = OTHER; note = 2'-O-methyluridine-3'-phosphate
  modified_base 16: mod_base = OTHER; note = 2'-O-methyluridine-3'-phosphate
  modified_base 17: mod_base = OTHER; note = 2'-O-methyluridine-3'-phosphate
  modified_base 18: mod_base = OTHER; note = 2'-O-methylguanosine-3'-phosphate
  modified_base 19: mod_base = OTHER; note = 2'-O-methylcytidine-3'-phosphate
  modified_base 20: mod_base = OTHER; note = 2'-O-methyladenosine-3'-phosphate
  modified_base 21: mod_base = OTHER; note = 2'-O-methyladenosine-3'-phosphate ((2S,4R)-1-[29-[[2-(acetylamino)-2-deoxy-beta-D-galactopyra nosyl]oxy]-14,14-bis[[3-[[3-[[5-[[2-(acetylamino)-2-deoxy-b eta-D-galactopyranosyl]oxy]-1-oxopentyl]amino]propyl]amino] -3-oxopropoxy]methyl]-1,12,19,25-tetraoxo-16-oxa-13,20,24-t riazanonacos-1-yl]-4-hydroxy-2-pyrrolidinyl)methyl ester
atacatgagcaagatttgcaa

SEQ ID NO: 1594 - RNA, 21 nt, synthetic construct
  source 1..21: mol_type = other RNA
  modified_base 1: mod_base = OTHER; note = 2'-O-methyluridine-3'-phosphorothioate
  modified_base 2: mod_base = OTHER; note = 2'-O-methylcytidine-3'-phosphorothioate
  modified_base 3: mod_base = OTHER; note = 2'-O-methyluridine-3'-phosphate
  modified_base 4: mod_base = OTHER; note = 2'-O-methylguanosine-3'-phosphate
  modified_base 5: mod_base = OTHER; note = 2'-O-methyladenosine-3'-phosphate
  modified_base 6: mod_base = OTHER; note = 2'-O-methylguanosine-3'-phosphate
  modified_base 7: mod_base = OTHER; note = 2'-O-methylcytidine-3'-phosphate
  modified_base 8: mod_base = OTHER; note = 2'-O-methyluridine-3'-phosphate
  modified_base 9: mod_base = OTHER; note = 2'-deoxy-2'-fluoroguanosine-3'-phosphate
  modified_base 10: mod_base = OTHER; note = 2'-deoxy-2'-fluoroadenosine-3'-phosphate
  modified_base 11: mod_base = OTHER; note = 2'-deoxy-2'-fluoroguanosine-3'-phosphate
  modified_base 12: mod_base = OTHER; note = 2'-O-methyluridine-3'-phosphate
  modified_base 13: mod_base = OTHER; note = 2'-O-methyluridine-3'-phosphate
  modified_base 14: mod_base = OTHER; note = 2'-O-methylguanosine-3'-phosphate
  modified_base 15: mod_base = OTHER; note = 2'-O-methylguanosine-3'-phosphate
  modified_base 16: mod_base = OTHER; note = 2'-O-methyluridine-3'-phosphate
  modified_base 17: mod_base = OTHER; note = 2'-O-methyluridine-3'-phosphate
  modified_base 18: mod_base = OTHER; note = 2'-O-methyluridine-3'-phosphate
  modified_base 19: mod_base = OTHER; note = 2'-O-methyluridine-3'-phosphate
  modified_base 20: mod_base = OTHER; note = 2'-O-methyladenosine-3'-phosphate
  modified_base 21: mod_base = OTHER; note = 2'-O-methyluridine-3'-phosphate ((2S,4R)-1-[29-[[2-(acetylamino)-2-deoxy-beta-D-galactopyra nosyl]oxy]-14,14-bis[[3-[[3-[[5-[[2-(acetylamino)-2-deoxy-b eta-D-galactopyranosyl]oxy]-1-oxopentyl]amino]propyl]amino] -3-oxopropoxy]methyl]-1,12,19,25-tetraoxo-16-oxa-13,20,24-t riazanonacos-1-yl]-4-hydroxy-2-pyrrolidinyl)methyl ester
tctgagctgagttggttttat

SEQ ID NO: 1595 - RNA, 21 nt, synthetic construct
  source 1..21: mol_type = other RNA
  modified_base 1: mod_base = OTHER; note = 2'-O-methylguanosine-3'-phosphorothioate
  modified_base 2: mod_base = OTHER; note = 2'-O-methylcytidine-3'-phosphorothioate
  modified_base 3: mod_base = OTHER; note = 2'-O-methyluridine-3'-phosphate
  modified_base 4: mod_base = OTHER; note = 2'-O-methylguanosine-3'-phosphate
  modified_base 5: mod_base = OTHER; note = 2'-O-methyladenosine-3'-phosphate
  modified_base 6: mod_base = OTHER; note = 2'-O-methylguanosine-3'-phosphate
  modified_base 7: mod_base = OTHER; note = 2'-O-methyluridine-3'-phosphate
  modified_base 8: mod_base = OTHER; note = 2'-O-methyluridine-3'-phosphate
  modified_base 9: mod_base = OTHER; note = 2'-deoxy-2'-fluoroguanosine-3'-phosphate
  modified_base 10: mod_base = OTHER; note = 2'-deoxy-2'-fluoroguanosine-3'-phosphate
  modified_base 11: mod_base = OTHER; note = 2'-deoxy-2'-fluorouridine-3'-phosphate
  modified_base 12: mod_base = OTHER; note = 2'-O-methyluridine-3'-phosphate
  modified_base 13: mod_base = OTHER; note = 2'-O-methyluridine-3'-phosphate
  modified_base 14: mod_base = OTHER; note = 2'-O-methyluridine-3'-phosphate
  modified_base 15: mod_base = OTHER; note = 2'-O-methyladenosine-3'-phosphate
  modified_base 16: mod_base = OTHER; note = 2'-O-methyluridine-3'-phosphate
  modified_base 17: mod_base = OTHER; note = 2'-O-methylguanosine-3'-phosphate
  modified_base 18: mod_base = OTHER; note = 2'-O-methyladenosine-3'-phosphate
  modified_base 19: mod_base = OTHER; note = 2'-O-methyladenosine-3'-phosphate
  modified_base 20: mod_base = OTHER; note = 2'-O-methyladenosine-3'-phosphate
  modified_base 21: mod_base = OTHER; note = 2'-O-methyladenosine-3'-phosphate ((2S,4R)-1-[29-[[2-(acetylamino)-2-deoxy-beta-D-galactopyra nosyl]oxy]-14,14-bis[[3-[[3-[[5-[[2-(acetylamino)-2-deoxy-b eta-D-galactopyranosyl]oxy]-1-oxopentyl]amino]propyl]amino] -3-oxopropoxy]methyl]-1,12,19,25-tetraoxo-16-oxa-13,20,24-t riazanonacos-1-yl]-4-hydroxy-2-pyrrolidinyl)methyl ester
gctgagttggttttatgaaaa

SEQ ID NO: 1596 - RNA, 21 nt, synthetic construct
  source 1..21: mol_type = other RNA
  modified_base 1: mod_base = OTHER; note = 2'-O-methylguanosine-3'-phosphorothioate
  modified_base 2: mod_base = OTHER; note = 2'-O-methylguanosine-3'-phosphorothioate
  modified_base 3: mod_base = OTHER; note = 2'-O-methylcytidine-3'-phosphate
  modified_base 4: mod_base = OTHER; note = 2'-O-methylcytidine-3'-phosphate
  modified_base 5: mod_base = OTHER; note = 2'-O-methyluridine-3'-phosphate
  modified_base 6: mod_base = OTHER; note = 2'-O-methyluridine-3'-phosphate
  modified_base 7: mod_base = OTHER; note = 2'-O-methyladenosine-3'-phosphate
  modified_base 8: mod_base = OTHER; note = 2'-O-methyluridine-3'-phosphate
  modified_base 9: mod_base = OTHER; note = 2'-deoxy-2'-fluorocytidine-3'-phosphate
  modified_base 10: mod_base = OTHER; note = 2'-deoxy-2'-fluorocytidine-3'-phosphate
  modified_base 11: mod_base = OTHER; note = 2'-deoxy-2'-fluorocytidine-3'-phosphate
  modified_base 12: mod_base = OTHER; note = 2'-O-methyluridine-3'-phosphate
  modified_base 13: mod_base = OTHER; note = 2'-O-methylcytidine-3'-phosphate
  modified_base 14: mod_base = OTHER; note = 2'-O-methylcytidine-3'-phosphate
  modified_base 15: mod_base = OTHER; note = 2'-O-methyluridine-3'-phosphate
  modified_base 16: mod_base = OTHER; note = 2'-O-methyluridine-3'-phosphate
  modified_base 17: mod_base = OTHER; note = 2'-O-methylcytidine-3'-phosphate
  modified_base 18: mod_base = OTHER; note = 2'-O-methylcytidine-3'-phosphate
  modified_base 19: mod_base = OTHER; note = 2'-O-methyluridine-3'-phosphate
  modified_base 20: mod_base = OTHER; note = 2'-O-methyluridine-3'-phosphate
  modified_base 21: mod_base = OTHER; note = 2'-O-methyladenosine-3'-phosphate ((2S,4R)-1-[29-[[2-(acetylamino)-2-deoxy-beta-D-galactopyra nosyl]oxy]-14,14-bis[[3-[[3-[[5-[[2-(acetylamino)-2-deoxy-b eta-D-galactopyranosyl]oxy]-1-oxopentyl]amino]propyl]amino] -3-oxopropoxy]methyl]-1,12,19,25-tetraoxo-16-oxa-13,20,24-t riazanonacos-1-yl]-4-hydroxy-2-pyrrolidinyl)methyl ester
ggccttatccctccttcctta

SEQ ID NO: 1597 - RNA, 21 nt, synthetic construct
  source 1..21: mol_type = other RNA
  modified_base 1: mod_base = OTHER; note = 2'-O-methylcytidine-3'-phosphorothioate
  modified_base 2: mod_base = OTHER; note = 2'-O-methyladenosine-3'-phosphorothioate
  modified_base 3: mod_base = OTHER; note = 2'-O-methylcytidine-3'-phosphate
  modified_base 4: mod_base = OTHER; note = 2'-O-methylcytidine-3'-phosphate
  modified_base 5: mod_base = OTHER; note = 2'-O-methyluridine-3'-phosphate
  modified_base 6: mod_base = OTHER; note = 2'-O-methyluridine-3'-phosphate
  modified_base 7: mod_base = OTHER; note = 2'-O-methyluridine-3'-phosphate
  modified_base 8: mod_base = OTHER; note = 2'-O-methyluridine-3'-phosphate
  modified_base 9: mod_base = OTHER; note = 2'-deoxy-2'-fluorouridine-3'-phosphate
  modified_base 10: mod_base = OTHER; note = 2'-deoxy-2'-fluorocytidine-3'-phosphate
  modified_base 11: mod_base = OTHER; note = 2'-deoxy-2'-fluoroadenosine-3'-phosphate
  modified_base 12: mod_base = OTHER; note = 2'-O-methylcytidine-3'-phosphate
  modified_base 13: mod_base = OTHER; note = 2'-O-methylcytidine-3'-phosphate
  modified_base 14: mod_base = OTHER; note = 2'-O-methyluridine-3'-phosphate
  modified_base 15: mod_base = OTHER; note = 2'-O-methyladenosine-3'-phosphate
  modified_base 16: mod_base = OTHER; note = 2'-O-methyladenosine-3'-phosphate
  modified_base 17: mod_base = OTHER; note = 2'-O-methylcytidine-3'-phosphate
  modified_base 18: mod_base = OTHER; note = 2'-O-methyluridine-3'-phosphate
  modified_base 19: mod_base = OTHER; note = 2'-O-methyladenosine-3'-phosphate
  modified_base 20: mod_base = OTHER; note = 2'-O-methyladenosine-3'-phosphate
  modified_base 21: mod_base = OTHER; note = 2'-O-methyluridine-3'-phosphate ((2S,4R)-1-[29-[[2-(acetylamino)-2-deoxy-beta-D-galactopyra nosyl]oxy]-14,14-bis[[3-[[3-[[5-[[2-(acetylamino)-2-deoxy-b eta-D-galactopyranosyl]oxy]-1-oxopentyl]amino]propyl]amino] -3-oxopropoxy]methyl]-1,12,19,25-tetraoxo-16-oxa-13,20,24-t riazanonacos-1-yl]-4-hydroxy-2-pyrrolidinyl)methyl ester
cacctttttcacctaactaat

SEQ ID NO: 1598 - RNA, 21 nt, synthetic construct
  source 1..21: mol_type = other RNA
  modified_base 1: mod_base = OTHER; note = 2'-O-methyluridine-3'-phosphorothioate
  modified_base 2: mod_base = OTHER; note = 2'-O-methylguanosine-3'-phosphorothioate
  modified_base 3: mod_base = OTHER; note = 2'-O-methylguanosine-3'-phosphate
  modified_base 4: mod_base = OTHER; note = 2'-O-methyladenosine-3'-phosphate
  modified_base 5: mod_base = OTHER; note = 2'-O-methyluridine-3'-phosphate
  modified_base 6: mod_base = OTHER; note = 2'-O-methyladenosine-3'-phosphate
  modified_base 7: mod_base = OTHER; note = 2'-O-methylcytidine-3'-phosphate
  modified_base 8: mod_base = OTHER; note = 2'-O-methyladenosine-3'-phosphate
  modified_base 9: mod_base = OTHER; note = 2'-deoxy-2'-fluorouridine-3'-phosphate
  modified_base 10: mod_base = OTHER; note = 2'-deoxy-2'-fluoroguanosine-3'-phosphate
  modified_base 11: mod_base = OTHER; note = 2'-deoxy-2'-fluoroadenosine-3'-phosphate
  modified_base 12: mod_base = OTHER; note = 2'-O-methylguanosine-3'-phosphate
  modified_base 13: mod_base = OTHER; note = 2'-O-methylcytidine-3'-phosphate
  modified_base 14: mod_base = OTHER; note = 2'-O-methyladenosine-3'-phosphate
  modified_base 15: mod_base = OTHER; note = 2'-O-methyladenosine-3'-phosphate
  modified_base 16: mod_base = OTHER; note = 2'-O-methylguanosine-3'-phosphate
  modified_base 17: mod_base = OTHER; note = 2'-O-methyladenosine-3'-phosphate
  modified_base 18: mod_base = OTHER; note = 2'-O-methyluridine-3'-phosphate
  modified_base 19: mod_base = OTHER; note = 2'-O-methyluridine-3'-phosphate
  modified_base 20: mod_base = OTHER; note = 2'-O-methyluridine-3'-phosphate
  modified_base 21: mod_base = OTHER; note = 2'-O-methyladenosine-3'-phosphate ((2S,4R)-1-[29-[[2-(acetylamino)-2-deoxy-beta-D-galactopyra nosyl]oxy]-14,14-bis[[3-[[3-[[5-[[2-(acetylamino)-2-deoxy-b eta-D-galactopyranosyl]oxy]-1-oxopentyl]amino]propyl]amino] -3-oxopropoxy]methyl]-1,12,19,25-tetraoxo-16-oxa-13,20,24-t riazanonacos-1-yl]-4-hydroxy-2-pyrrolidinyl)methyl ester
tggatacatgagcaagattta

SEQ ID NO: 1599 - RNA, 21 nt, synthetic construct
  source 1..21: mol_type = other RNA
  modified_base 1: mod_base = OTHER; note = 2'-O-methylcytidine-3'-phosphorothioate
  modified_base 2: mod_base = OTHER; note = 2'-O-methyluridine-3'-phosphorothioate
  modified_base 3: mod_base = OTHER; note = 2'-O-methyladenosine-3'-phosphate
  modified_base 4: mod_base = OTHER; note = 2'-O-methyluridine-3'-phosphate
  modified_base 5: mod_base = OTHER; note = 2'-O-methyluridine-3'-phosphate
  modified_base 6: mod_base = OTHER; note = 2'-O-methyladenosine-3'-phosphate
  modified_base 7: mod_base = OTHER; note = 2'-O-methyladenosine-3'-phosphate
  modified_base 8: mod_base = OTHER; note = 2'-O-methyluridine-3'-phosphate
  modified_base 9: mod_base = OTHER; note = 2'-deoxy-2'-fluoroguanosine-3'-phosphate
  modified_base 10: mod_base = OTHER; note = 2'-deoxy-2'-fluoroguanosine-3'-phosphate
  modified_base 11: mod_base = OTHER; note = 2'-deoxy-2'-fluorouridine-3'-phosphate
  modified_base 12: mod_base = OTHER; note = 2'-O-methylcytidine-3'-phosphate
  modified_base 13: mod_base = OTHER; note = 2'-O-methyladenosine-3'-phosphate
  modified_base 14: mod_base = OTHER; note = 2'-O-methylguanosine-3'-phosphate
  modified_base 15: mod_base = OTHER; note = 2'-O-methyladenosine-3'-phosphate
  modified_base 16: mod_base = OTHER; note = 2'-O-methylcytidine-3'-phosphate
  modified_base 17: mod_base = OTHER; note = 2'-O-methyluridine-3'-phosphate
  modified_base 18: mod_base = OTHER; note = 2'-O-methylguanosine-3'-phosphate
  modified_base 19: mod_base = OTHER; note = 2'-O-methyluridine-3'-phosphate
  modified_base 20: mod_base = OTHER; note = 2'-O-methyluridine-3'-phosphate
  modified_base 21: mod_base = OTHER; note = 2'-O-methyladenosine-3'-phosphate ((2S,4R)-1-[29-[[2-(acetylamino)-2-deoxy-beta-D-galactopyra nosyl]oxy]-14,14-bis[[3-[[3-[[5-[[2-(acetylamino)-2-deoxy-b eta-D-galactopyranosyl]oxy]-1-oxopentyl]amino]propyl]amino] -3-oxopropoxy]methyl]-1,12,19,25-tetraoxo-16-oxa-13,20,24-t riazanonacos-1-yl]-4-hydroxy-2-pyrrolidinyl)methyl ester
ctattaatggtcagactgtta

SEQ ID NO: 1600 - RNA, 21 nt, synthetic construct
  source 1..21: mol_type = other RNA
  modified_base 1: mod_base = OTHER; note = 2'-O-methylguanosine-3'-phosphorothioate
  modified_base 2: mod_base = OTHER; note = 2'-O-methylcytidine-3'-phosphorothioate
  modified_base 3: mod_base = OTHER; note = 2'-O-methyladenosine-3'-phosphate
  modified_base 4: mod_base = OTHER; note = 2'-O-methylcytidine-3'-phosphate
  modified_base 5: mod_base = OTHER; note = 2'-O-methyladenosine-3'-phosphate
  modified_base 6: mod_base = OTHER; note = 2'-O-methylguanosine-3'-phosphate
  modified_base 7: mod_base = OTHER; note = 2'-O-methylguanosine-3'-phosphate
  modified_base 8: mod_base = OTHER; note = 2'-O-methylguanosine-3'-phosphate
  modified_base 9: mod_base = OTHER; note = 2'-deoxy-2'-fluoroadenosine-3'-phosphate
  modified_base 10: mod_base = OTHER; note = 2'-deoxy-2'-fluoroadenosine-3'-phosphate
  modified_base 11: mod_base = OTHER; note = 2'-deoxy-2'-fluorocytidine-3'-phosphate
  modified_base 12: mod_base = OTHER; note = 2'-O-methylcytidine-3'-phosphate
  modified_base 13: mod_base = OTHER; note = 2'-O-methyluridine-3'-phosphate
  modified_base 14: mod_base = OTHER; note = 2'-O-methylcytidine-3'-phosphate
  modified_base 15: mod_base = OTHER; note = 2'-O-methyluridine-3'-phosphate
  modified_base 16: mod_base = OTHER; note = 2'-O-methyladenosine-3'-phosphate
  modified_base 17: mod_base = OTHER; note = 2'-O-methylcytidine-3'-phosphate
  modified_base 18: mod_base = OTHER; note = 2'-O-methylcytidine-3'-phosphate
  modified_base 19: mod_base = OTHER; note = 2'-O-methyluridine-3'-phosphate
  modified_base 20: mod_base = OTHER; note = 2'-O-methyluridine-3'-phosphate
  modified_base 21: mod_base = OTHER; note = 2'-O-methyladenosine-3'-phosphate ((2S,4R)-1-[29-[[2-(acetylamino)-2-deoxy-beta-D-galactopyra nosyl]oxy]-14,14-bis[[3-[[3-[[5-[[2-(acetylamino)-2-deoxy-b eta-D-galactopyranosyl]oxy]-1-oxopentyl]amino]propyl]amino] -3-oxopropoxy]methyl]-1,12,19,25-tetraoxo-16-oxa-13,20,24-t riazanonacos-1-yl]-4-hydroxy-2-pyrrolidinyl)methyl ester
gcacagggaacctctacctta

SEQ ID NO: 1601 - RNA, 21 nt, synthetic construct
  source 1..21: mol_type = other RNA
  modified_base 1: mod_base = OTHER; note = 2'-O-methyluridine-3'-phosphorothioate
  modified_base 2: mod_base = OTHER; note = 2'-O-methyluridine-3'-phosphorothioate
  modified_base 3: mod_base = OTHER; note = 2'-O-methyladenosine-3'-phosphate
  modified_base 4: mod_base = OTHER; note = 2'-O-methyluridine-3'-phosphate
  modified_base 5: mod_base = OTHER; note = 2'-O-methylguanosine-3'-phosphate
  modified_base 6: mod_base = OTHER; note = 2'-O-methyluridine-3'-phosphate
  modified_base 7: mod_base = OTHER; note = 2'-O-methyladenosine-3'-phosphate
  modified_base 8: mod_base = OTHER; note = 2'-O-methyladenosine-3'-phosphate
  modified_base 9: mod_base = OTHER; note = 2'-deoxy-2'-fluorouridine-3'-phosphate
  modified_base 10: mod_base = OTHER; note = 2'-deoxy-2'-fluoroguanosine-3'-phosphate
  modified_base 11: mod_base = OTHER; note = 2'-deoxy-2'-fluorocytidine-3'-phosphate
  modified_base 12: mod_base = OTHER; note = 2'-O-methyluridine-3'-phosphate
  modified_base 13: mod_base = OTHER; note = 2'-O-methylguanosine-3'-phosphate
  modified_base 14: mod_base = OTHER; note = 2'-O-methylcytidine-3'-phosphate
  modified_base 15: mod_base = OTHER; note = 2'-O-methylcytidine-3'-phosphate
  modified_base 16: mod_base = OTHER; note = 2'-O-methylcytidine-3'-phosphate
  modified_base 17: mod_base = OTHER; note = 2'-O-methyluridine-3'-phosphate
  modified_base 18: mod_base = OTHER; note = 2'-O-methylguanosine-3'-phosphate
  modified_base 19: mod_base = OTHER; note = 2'-O-methyluridine-3'-phosphate
  modified_base 20: mod_base = OTHER; note = 2'-O-methyladenosine-3'-phosphate
  modified_base 21: mod_base = OTHER; note = 2'-O-methyladenosine-3'-phosphate ((2S,4R)-1-[29-[[2-(acetylamino)-2-deoxy-beta-D-galactopyra nosyl]oxy]-14,14-bis[[3-[[3-[[5-[[2-(acetylamino)-2-deoxy-b eta-D-galactopyranosyl]oxy]-1-oxopentyl]amino]propyl]amino] -3-oxopropoxy]methyl]-1,12,19,25-tetraoxo-16-oxa-13,20,24-t riazanonacos-1-yl]-4-hydroxy-2-pyrrolidinyl)methyl ester
ttatgtaatgctgccctgtaa

SEQ ID NO: 1602 - RNA, 21 nt, synthetic construct
  source 1..21: mol_type = other RNA
  modified_base 1: mod_base = OTHER; note = 2'-O-methylguanosine-3'-phosphorothioate
  modified_base 2: mod_base = OTHER; note = 2'-O-methyluridine-3'-phosphorothioate
  modified_base 3: mod_base = OTHER; note = 2'-O-methylguanosine-3'-phosphate
  modified_base 4: mod_base = OTHER; note = 2'-O-methyladenosine-3'-phosphate
  modified_base 5: mod_base = OTHER; note = 2'-O-methylguanosine-3'-phosphate
  modified_base 6: mod_base = OTHER; note = 2'-O-methyluridine-3'-phosphate
  modified_base 7: mod_base = OTHER; note = 2'-O-methylguanosine-3'-phosphate
  modified_base 8: mod_base = OTHER; note = 2'-O-methyladenosine-3'-phosphate
  modified_base 9: mod_base = OTHER; note = 2'-deoxy-2'-fluorocytidine-3'-phosphate
  modified_base 10: mod_base = OTHER; note = 2'-deoxy-2'-fluoroadenosine-3'-phosphate
  modified_base 11: mod_base = OTHER; note = 2'-deoxy-2'-fluoroadenosine-3'-phosphate
  modified_base 12: mod_base = OTHER; note = 2'-O-methylcytidine-3'-phosphate
  modified_base 13: mod_base = OTHER; note = 2'-O-methylguanosine-3'-phosphate
  modified_base 14: mod_base = OTHER; note = 2'-O-methyluridine-3'-phosphate
  modified_base 15: mod_base = OTHER; note = 2'-O-methyladenosine-3'-phosphate
  modified_base 16: mod_base = OTHER; note = 2'-O-methylcytidine-3'-phosphate
  modified_base 17: mod_base = OTHER; note = 2'-O-methylcytidine-3'-phosphate
  modified_base 18: mod_base = OTHER; note = 2'-O-methylcytidine-3'-phosphate
  modified_base 19: mod_base = OTHER; note = 2'-O-methyluridine-3'-phosphate
  modified_base 20: mod_base = OTHER; note = 2'-O-methyluridine-3'-phosphate
  modified_base 21: mod_base = OTHER; note = 2'-O-methyladenosine-3'-phosphate ((2S,4R)-1-[29-[[2-(acetylamino)-2-deoxy-beta-D-galactopyra nosyl]oxy]-14,14-bis[[3-[[3-[[5-[[2-(acetylamino)-2-deoxy-b eta-D-galactopyranosyl]oxy]-1-oxopentyl]amino]propyl]amino] -3-oxopropoxy]methyl]-1,12,19,25-tetraoxo-16-oxa-13,20,24-t riazanonacos-1-yl]-4-hydroxy-2-pyrrolidinyl)methyl ester
gtgagtgacaacgtaccctta

SEQ ID NO: 1603 - RNA, 21 nt, synthetic construct
  source 1..21: mol_type = other RNA
  modified_base 1: mod_base = OTHER; note = 2'-O-methylguanosine-3'-phosphorothioate
  modified_base 2: mod_base = OTHER; note = 2'-O-methyluridine-3'-phosphorothioate
  modified_base 3: mod_base = OTHER; note = 2'-O-methylguanosine-3'-phosphate
  modified_base 4: mod_base = OTHER; note = 2'-O-methylcytidine-3'-phosphate
  modified_base 5: mod_base = OTHER; note = 2'-O-methyluridine-3'-phosphate
  modified_base 6: mod_base = OTHER; note = 2'-O-methyladenosine-3'-phosphate
  modified_base 7: mod_base = OTHER; note = 2'-O-methyladenosine-3'-phosphate
  modified_base 8: mod_base = OTHER; note = 2'-O-methyladenosine-3'-phosphate
  modified_base 9: mod_base = OTHER; note = 2'-deoxy-2'-fluoroguanosine-3'-phosphate
  modified_base 10: mod_base = OTHER; note = 2'-deoxy-2'-fluorouridine-3'-phosphate
  modified_base 11: mod_base = OTHER; note = 2'-deoxy-2'-fluorouridine-3'-phosphate
  modified_base 12: mod_base = OTHER; note = 2'-O-methyluridine-3'-phosphate
  modified_base 13: mod_base = OTHER; note = 2'-O-methylcytidine-3'-phosphate
  modified_base 14: mod_base = OTHER; note = 2'-O-methylcytidine-3'-phosphate
  modified_base 15: mod_base = OTHER; note = 2'-O-methylcytidine-3'-phosphate
  modified_base 16: mod_base = OTHER; note = 2'-O-methyladenosine-3'-phosphate
  modified_base 17: mod_base = OTHER; note = 2'-O-methyluridine-3'-phosphate
  modified_base 18: mod_base = OTHER; note = 2'-O-methylcytidine-3'-phosphate
  modified_base 19: mod_base = OTHER; note = 2'-O-methyluridine-3'-phosphate
  modified_base 20: mod_base = OTHER; note = 2'-O-methyluridine-3'-phosphate
  modified_base 21: mod_base = OTHER; note = 2'-O-methyluridine-3'-phosphate ((2S,4R)-1-[29-[[2-(acetylamino)-2-deoxy-beta-D-galactopyra nosyl]oxy]-14,14-bis[[3-[[3-[[5-[[2-(acetylamino)-2-deoxy-b eta-D-galactopyranosyl]oxy]-1-oxopentyl]amino]propyl]amino] -3-oxopropoxy]methyl]-1,12,19,25-tetraoxo-16-oxa-13,20,24-t riazanonacos-1-yl]-4-hydroxy-2-pyrrolidinyl)methyl ester
gtgctaaagtttcccatcttt

SEQ ID NO: 1604 - RNA, 21 nt, synthetic construct
  source 1..21: mol_type = other RNA
  modified_base 1: mod_base = OTHER; note = 2'-O-methyluridine-3'-phosphorothioate
  modified_base 2: mod_base = OTHER; note = 2'-O-methyladenosine-3'-phosphorothioate
  modified_base 3: mod_base = OTHER; note = 2'-O-methylcytidine-3'-phosphate
  modified_base 4: mod_base = OTHER; note = 2'-O-methylcytidine-3'-phosphate
  modified_base 5: mod_base = OTHER; note = 2'-O-methyluridine-3'-phosphate
  modified_base 6: mod_base = OTHER; note = 2'-O-methylguanosine-3'-phosphate
  modified_base 7: mod_base = OTHER; note = 2'-O-methyluridine-3'-phosphate
  modified_base 8: mod_base = OTHER; note = 2'-O-methyluridine-3'-phosphate
  modified_base 9: mod_base = OTHER; note = 2'-deoxy-2'-fluoroguanosine-3'-phosphate
  modified_base 10: mod_base = OTHER; note = 2'-deoxy-2'-fluoroadenosine-3'-phosphate
  modified_base 11: mod_base = OTHER; note = 2'-deoxy-2'-fluoroadenosine-3'-phosphate
  modified_base 12: mod_base = OTHER; note = 2'-O-methyluridine-3'-phosphate
  modified_base 13: mod_base = OTHER; note = 2'-O-methyluridine-3'-phosphate
  modified_base 14: mod_base = OTHER; note = 2'-O-methyluridine-3'-phosphate
  modified_base 15: mod_base = OTHER; note = 2'-O-methyluridine-3'-phosphate
  modified_base 16: mod_base = OTHER; note = 2'-O-methylguanosine-3'-phosphate
  modified_base 17: mod_base = OTHER; note = 2'-O-methyluridine-3'-phosphate
  modified_base 18: mod_base = OTHER; note = 2'-O-methyladenosine-3'-phosphate
  modified_base 19: mod_base = OTHER; note = 2'-O-methyluridine-3'-phosphate
  modified_base 20: mod_base = OTHER; note = 2'-O-methyluridine-3'-phosphate
  modified_base 21: mod_base = OTHER; note = 2'-O-methyladenosine-3'-phosphate ((2S,4R)-1-[29-[[2-(acetylamino)-2-deoxy-beta-D-galactopyra nosyl]oxy]-14,14-bis[[3-[[3-[[5-[[2-(acetylamino)-2-deoxy-b eta-D-galactopyranosyl]oxy]-1-oxopentyl]amino]propyl]amino] -3-oxopropoxy]methyl]-1,12,19,25-tetraoxo-16-oxa-13,20,24-t riazanonacos-1-yl]-4-hydroxy-2-pyrrolidinyl)methyl ester
tacctgttgaattttgtatta

SEQ ID NO: 1605 - RNA, 21 nt, synthetic construct
  source 1..21: mol_type = other RNA
  modified_base 1: mod_base = OTHER; note = 2'-O-methylguanosine-3'-phosphorothioate
  modified_base 2: mod_base = OTHER; note = 2'-O-methylguanosine-3'-phosphorothioate
  modified_base 3: mod_base = OTHER; note = 2'-O-methylguanosine-3'-phosphate
  modified_base 4: mod_base = OTHER; note = 2'-O-methylguanosine-3'-phosphate
  modified_base 5: mod_base = OTHER; note = 2'-O-methyluridine-3'-phosphate
  modified_base 6: mod_base = OTHER; note = 2'-O-methyladenosine-3'-phosphate
  modified_base 7: mod_base = OTHER; note = 2'-O-methyladenosine-3'-phosphate
  modified_base 8: mod_base = OTHER; note = 2'-O-methylcytidine-3'-phosphate
  modified_base 9: mod_base = OTHER; note = 2'-deoxy-2'-fluoroadenosine-3'-phosphate
  modified_base 10: mod_base = OTHER; note = 2'-deoxy-2'-fluoroadenosine-3'-phosphate
  modified_base 11: mod_base = OTHER; note = 2'-deoxy-2'-fluoroguanosine-3'-phosphate
  modified_base 12: mod_base = OTHER; note = 2'-O-methyladenosine-3'-phosphate
  modified_base 13: mod_base = OTHER; note = 2'-O-methyluridine-3'-phosphate
  modified_base 14: mod_base = OTHER; note = 2'-O-methylguanosine-3'-phosphate
  modified_base 15: mod_base = OTHER; note = 2'-O-methyladenosine-3'-phosphate
  modified_base 16: mod_base = OTHER; note = 2'-O-methyluridine-3'-phosphate
  modified_base 17: mod_base = OTHER; note = 2'-O-methyladenosine-3'-phosphate
  modified_base 18: mod_base = OTHER; note = 2'-O-methyladenosine-3'-phosphate
  modified_base 19: mod_base = OTHER; note = 2'-O-methyluridine-3'-phosphate
  modified_base 20: mod_base = OTHER; note = 2'-O-methylcytidine-3'-phosphate
  modified_base 21: mod_base = OTHER; note = 2'-O-methyluridine-3'-phosphate ((2S,4R)-1-[29-[[2-(acetylamino)-2-deoxy-beta-D-galactopyra nosyl]oxy]-14,14-bis[[3-[[3-[[5-[[2-(acetylamino)-2-deoxy-b eta-D-galactopyranosyl]oxy]-1-oxopentyl]amino]propyl]amino] -3-oxopropoxy]methyl]-1,12,19,25-tetraoxo-16-oxa-13,20,24-t riazanonacos-1-yl]-4-hydroxy-2-pyrrolidinyl)methyl ester
ggggtaacaagatgataatct

SEQ ID NO: 1606 - RNA, 21 nt, synthetic construct
  source 1..21: mol_type = other RNA
  modified_base 1: mod_base = OTHER; note = 2'-O-methylcytidine-3'-phosphorothioate
  modified_base 2: mod_base = OTHER; note = 2'-O-methylguanosine-3'-phosphorothioate
  modified_base 3: mod_base = OTHER; note = 2'-O-methyladenosine-3'-phosphate
  modified_base 4: mod_base = OTHER; note = 2'-O-methylcytidine-3'-phosphate
  modified_base 5: mod_base = OTHER; note = 2'-O-methyladenosine-3'-phosphate
  modified_base 6: mod_base = OTHER; note = 2'-O-methyluridine-3'-phosphate
  modified_base 7: mod_base = OTHER; note = 2'-O-methylcytidine-3'-phosphate
  modified_base 8: mod_base = OTHER; note = 2'-O-methyluridine-3'-phosphate
  modified_base 9: mod_base = OTHER; note = 2'-deoxy-2'-fluoroguanosine-3'-phosphate
  modified_base 10: mod_base = OTHER; note = 2'-deoxy-2'-fluorocytidine-3'-phosphate
  modified_base 11: mod_base = OTHER; note = 2'-deoxy-2'-fluorocytidine-3'-phosphate
  modified_base 12: mod_base = OTHER; note = 2'-O-methylcytidine-3'-phosphate
  modified_base 13: mod_base = OTHER; note = 2'-O-methyluridine-3'-phosphate
  modified_base 14: mod_base = OTHER; note = 2'-O-methyladenosine-3'-phosphate
  modified_base 15: mod_base = OTHER; note = 2'-O-methyladenosine-3'-phosphate
  modified_base 16: mod_base = OTHER; note = 2'-O-methyladenosine-3'-phosphate
  modified_base 17: mod_base = OTHER; note = 2'-O-methylguanosine-3'-phosphate
  modified_base 18: mod_base = OTHER; note = 2'-O-methyluridine-3'-phosphate
  modified_base 19: mod_base = OTHER; note = 2'-O-methylcytidine-3'-phosphate
  modified_base 20: mod_base = OTHER; note = 2'-O-methyladenosine-3'-phosphate
  modified_base 21: mod_base = OTHER; note = 2'-O-methyladenosine-3'-phosphate ((2S,4R)-1-[29-[[2-(acetylamino)-2-deoxy-beta-D-galactopyra nosyl]oxy]-14,14-bis[[3-[[3-[[5-[[2-(acetylamino)-2-deoxy-b eta-D-galactopyranosyl]oxy]-1-oxopentyl]amino]propyl]amino] -3-oxopropoxy]methyl]-1,12,19,25-tetraoxo-16-oxa-13,20,24-t riazanonacos-1-yl]-4-hydroxy-2-pyrrolidinyl)methyl ester
cgacatctgccctaaagtcaa

SEQ ID NO: 1607 - RNA, 21 nt, synthetic construct
  source 1..21: mol_type = other RNA
  modified_base 1: mod_base = OTHER; note = 2'-O-methyluridine-3'-phosphorothioate
  modified_base 2: mod_base = OTHER; note = 2'-O-methylguanosine-3'-phosphorothioate
  modified_base 3: mod_base = OTHER; note = 2'-O-methylguanosine-3'-phosphate
  modified_base 4: mod_base = OTHER; note = 2'-O-methyluridine-3'-phosphate
  modified_base 5: mod_base = OTHER; note = 2'-O-methylguanosine-3'-phosphate
  modified_base 6: mod_base = OTHER; note = 2'-O-methyladenosine-3'-phosphate
  modified_base 7: mod_base = OTHER; note = 2'-O-methylcytidine-3'-phosphate
  modified_base 8: mod_base = OTHER; note = 2'-O-methyladenosine-3'-phosphate
  modified_base 9: mod_base = OTHER; note = 2'-deoxy-2'-fluorouridine-3'-phosphate
  modified_base 10: mod_base = OTHER; note = 2'-deoxy-2'-fluoroguanosine-3'-phosphate
  modified_base 11: mod_base = OTHER; note = 2'-deoxy-2'-fluoroguanosine-3'-phosphate
  modified_base 12: mod_base = OTHER; note = 2'-O-methylcytidine-3'-phosphate
  modified_base 13: mod_base = OTHER; note = 2'-O-methyluridine-3'-phosphate
  modified_base 14: mod_base = OTHER; note = 2'-O-methyluridine-3'-phosphate
  modified_base 15: mod_base = OTHER; note = 2'-O-methylcytidine-3'-phosphate
  modified_base 16: mod_base = OTHER; note = 2'-O-methylcytidine-3'-phosphate
  modified_base 17: mod_base = OTHER; note = 2'-O-methyladenosine-3'-phosphate
  modified_base 18: mod_base = OTHER; note = 2'-O-methylguanosine-3'-phosphate
  modified_base 19: mod_base = OTHER; note = 2'-O-methyladenosine-3'-phosphate
  modified_base 20: mod_base = OTHER; note = 2'-O-methyluridine-3'-phosphate
  modified_base 21: mod_base = OTHER; note = 2'-O-methyladenosine-3'-phosphate ((2S,4R)-1-[29-[[2-(acetylamino)-2-deoxy-beta-D-galactopyra nosyl]oxy]-14,14-bis[[3-[[3-[[5-[[2-(acetylamino)-2-deoxy-b eta-D-galactopyranosyl]oxy]-1-oxopentyl]amino]propyl]amino] -3-oxopropoxy]methyl]-1,12,19,25-tetraoxo-16-oxa-13,20,24-t riazanonacos-1-yl]-4-hydroxy-2-pyrrolidinyl)methyl ester
tggtgacatggcttccagata

SEQ ID NO: 1608 - RNA, 21 nt, synthetic construct
  source 1..21: mol_type = other RNA
  modified_base 1: mod_base = OTHER; note = 2'-O-methyluridine-3'-phosphorothioate
  modified_base 2: mod_base = OTHER; note = 2'-O-methyluridine-3'-phosphorothioate
  modified_base 3: mod_base = OTHER; note = 2'-O-methylguanosine-3'-phosphate
  modified_base 4: mod_base = OTHER; note = 2'-O-methylcytidine-3'-phosphate
  modified_base 5: mod_base = OTHER; note = 2'-O-methyluridine-3'-phosphate
  modified_base 6: mod_base = OTHER; note = 2'-O-methyladenosine-3'-phosphate
  modified_base 7: mod_base = OTHER; note = 2'-O-methylcytidine-3'-phosphate
  modified_base 8: mod_base = OTHER; note = 2'-O-methylcytidine-3'-phosphate
  modified_base 9: mod_base = OTHER; note = 2'-deoxy-2'-fluorocytidine-3'-phosphate
  modified_base 10: mod_base = OTHER; note = 2'-deoxy-2'-fluoroadenosine-3'-phosphate
  modified_base 11: mod_base = OTHER; note = 2'-deoxy-2'-fluorouridine-3'-phosphate
  modified_base 12: mod_base = OTHER; note = 2'-O-methyluridine-3'-phosphate
  modified_base 13: mod_base = OTHER; note = 2'-O-methyladenosine-3'-phosphate
  modified_base 14: mod_base = OTHER; note = 2'-O-methylguanosine-3'-phosphate
  modified_base 15: mod_base = OTHER; note = 2'-O-methylguanosine-3'-phosphate
  modified_base 16: mod_base = OTHER; note = 2'-O-methyladenosine-3'-phosphate
  modified_base 17: mod_base = OTHER; note = 2'-O-methyluridine-3'-phosphate
  modified_base 18: mod_base = OTHER; note = 2'-O-methyladenosine-3'-phosphate
  modified_base 19: mod_base = OTHER; note = 2'-O-methyladenosine-3'-phosphate
  modified_base 20: mod_base = OTHER; note = 2'-O-methyluridine-3'-phosphate
  modified_base 21: mod_base = OTHER; note = 2'-O-methyladenosine-3'-phosphate ((2S,4R)-1-[29-[[2-(acetylamino)-2-deoxy-beta-D-galactopyra nosyl]oxy]-14,14-bis[[3-[[3-[[5-[[2-(acetylamino)-2-deoxy-b eta-D-galactopyranosyl]oxy]-1-oxopentyl]amino]propyl]amino] -3-oxopropoxy]methyl]-1,12,19,25-tetraoxo-16-oxa-13,20,24-t riazanonacos-1-yl]-4-hydroxy-2-pyrrolidinyl)methyl ester
ttgctacccattaggataata

SEQ ID NO: 1609 - RNA, 21 nt, synthetic construct
  source 1..21: mol_type = other RNA
  modified_base 1: mod_base = OTHER; note = 2'-O-methylcytidine-3'-phosphorothioate
  modified_base 2: mod_base = OTHER; note = 2'-O-methyladenosine-3'-phosphorothioate
  modified_base 3: mod_base = OTHER; note = 2'-O-methyluridine-3'-phosphate
  modified_base 4: mod_base = OTHER; note = 2'-O-methylguanosine-3'-phosphate
  modified_base 5: mod_base = OTHER; note = 2'-O-methyladenosine-3'-phosphate
  modified_base 6: mod_base = OTHER; note = 2'-O-methylguanosine-3'-phosphate
  modified_base 7: mod_base = OTHER; note = 2'-O-methylcytidine-3'-phosphate
  modified_base 8: mod_base = OTHER; note = 2'-O-methyladenosine-3'-phosphate
  modified_base 9: mod_base = OTHER; note = 2'-deoxy-2'-fluoroadenosine-3'-phosphate
  modified_base 10: mod_base = OTHER; note = 2'-deoxy-2'-fluoroguanosine-3'-phosphate
  modified_base 11: mod_base = OTHER; note = 2'-deoxy-2'-fluoroadenosine-3'-phosphate
  modified_base 12: mod_base = OTHER; note = 2'-O-methyluridine-3'-phosphate
  modified_base 13: mod_base = OTHER; note = 2'-O-methyluridine-3'-phosphate
  modified_base 14: mod_base = OTHER; note = 2'-O-methyluridine-3'-phosphate
  modified_base 15: mod_base = OTHER; note = 2'-O-methylguanosine-3'-phosphate
  modified_base 16: mod_base = OTHER; note = 2'-O-methylcytidine-3'-phosphate
  modified_base 17: mod_base = OTHER; note = 2'-O-methyladenosine-3'-phosphate
  modified_base 18: mod_base = OTHER; note = 2'-O-methyladenosine-3'-phosphate
  modified_base 19: mod_base = OTHER; note = 2'-O-methylcytidine-3'-phosphate
  modified_base 20: mod_base = OTHER; note = 2'-O-methyluridine-3'-phosphate
  modified_base 21: mod_base = OTHER; note = 2'-O-methyluridine-3'-phosphate ((2S,4R)-1-[29-[[2-(acetylamino)-2-deoxy-beta-D-galactopyra nosyl]oxy]-14,14-bis[[3-[[3-[[5-[[2-(acetylamino)-2-deoxy-b eta-D-galactopyranosyl]oxy]-1-oxopentyl]amino]propyl]amino] -3-oxopropoxy]methyl]-1,12,19,25-tetraoxo-16-oxa-13,20,24-t riazanonacos-1-yl]-4-hydroxy-2-pyrrolidinyl)methyl ester
catgagcaagatttgcaactt

SEQ ID NO: 1610 - RNA, 21 nt, synthetic construct
  source 1..21: mol_type = other RNA
  modified_base 1: mod_base = OTHER; note = 2'-O-methyladenosine-3'-phosphorothioate
  modified_base 2: mod_base = OTHER; note = 2'-O-methyladenosine-3'-phosphorothioate
  modified_base 3: mod_base = OTHER; note = 2'-O-methyladenosine-3'-phosphate
  modified_base 4: mod_base = OTHER; note = 2'-O-methyluridine-3'-phosphate
  modified_base 5: mod_base = OTHER; note = 2'-O-methylguanosine-3'-phosphate
  modified_base 6: mod_base = OTHER; note = 2'-O-methyladenosine-3'-phosphate
  modified_base 7: mod_base = OTHER; note = 2'-O-methyladenosine-3'-phosphate
  modified_base 8: mod_base = OTHER; note = 2'-O-methyladenosine-3'-phosphate
  modified_base 9: mod_base = OTHER; note = 2'-deoxy-2'-fluoroguanosine-3'-phosphate
  modified_base 10: mod_base = OTHER; note = 2'-deoxy-2'-fluoroadenosine-3'-phosphate
  modified_base 11: mod_base = OTHER; note = 2'-deoxy-2'-fluorocytidine-3'-phosphate
  modified_base 12: mod_base = OTHER; note = 2'-O-methyladenosine-3'-phosphate
  modified_base 13: mod_base = OTHER; note = 2'-O-methyladenosine-3'-phosphate
  modified_base 14: mod_base = OTHER; note = 2'-O-methyladenosine-3'-phosphate
  modified_base 15: mod_base = OTHER; note = 2'-O-methylguanosine-3'-phosphate
  modified_base 16: mod_base = OTHER; note = 2'-O-methylguanosine-3'-phosphate
  modified_base 17: mod_base = OTHER; note = 2'-O-methyluridine-3'-phosphate
  modified_base 18: mod_base = OTHER; note = 2'-O-methylguanosine-3'-phosphate
  modified_base 19: mod_base = OTHER; note = 2'-O-methylguanosine-3'-phosphate
  modified_base 20: mod_base = OTHER; note = 2'-O-methyladenosine-3'-phosphate
  modified_base 21: mod_base = OTHER; note = 2'-O-methyluridine-3'-phosphate ((2S,4R)-1-[29-[[2-(acetylamino)-2-deoxy-beta-D-galactopyra nosyl]oxy]-14,14-bis[[3-[[3-[[5-[[2-(acetylamino)-2-deoxy-b eta-D-galactopyranosyl]oxy]-1-oxopentyl]amino]propyl]amino] -3-oxopropoxy]methyl]-1,12,19,25-tetraoxo-16-oxa-13,20,24-t riazanonacos-1-yl]-4-hydroxy-2-pyrrolidinyl)methyl ester
aaatgaaagacaaaggtggat

SEQ ID NO: 1611 - RNA, 21 nt, synthetic construct
  source 1..21: mol_type = other RNA
  modified_base 1: mod_base = OTHER; note = 2'-O-methyluridine-3'-phosphorothioate
  modified_base 2: mod_base = OTHER; note = 2'-O-methylguanosine-3'-phosphorothioate
  modified_base 3: mod_base = OTHER; note = 2'-O-methylguanosine-3'-phosphate
  modified_base 4: mod_base = OTHER; note = 2'-O-methylguanosine-3'-phosphate
  modified_base 5: mod_base = OTHER; note = 2'-O-methyladenosine-3'-phosphate
  modified_base 6: mod_base = OTHER; note = 2'-O-methylguanosine-3'-phosphate
  modified_base 7: mod_base = OTHER; note = 2'-O-methyladenosine-3'-phosphate
  modified_base 8: mod_base = OTHER; note = 2'-O-methylguanosine-3'-phosphate
  modified_base 9: mod_base = OTHER; note = 2'-deoxy-2'-fluoroadenosine-3'-phosphate
  modified_base 10: mod_base = OTHER; note = 2'-deoxy-2'-fluorouridine-3'-phosphate
  modified_base 11: mod_base = OTHER; note = 2'-deoxy-2'-fluoroadenosine-3'-phosphate
  modified_base 12: mod_base = OTHER; note = 2'-O-methyluridine-3'-phosphate
  modified_base 13: mod_base = OTHER; note = 2'-O-methylguanosine-3'-phosphate
  modified_base 14: mod_base = OTHER; note = 2'-O-methylcytidine-3'-phosphate
  modified_base 15: mod_base = OTHER; note = 2'-O-methylcytidine-3'-phosphate
  modified_base 16: mod_base = OTHER; note = 2'-O-methyluridine-3'-phosphate
  modified_base 17: mod_base = OTHER; note = 2'-O-methyluridine-3'-phosphate
  modified_base 18: mod_base = OTHER; note = 2'-O-methylcytidine-3'-phosphate
  modified_base 19: mod_base = OTHER; note = 2'-O-methylguanosine-3'-phosphate
  modified_base 20: mod_base = OTHER; note = 2'-O-methyladenosine-3'-phosphate
  modified_base 21: mod_base = OTHER; note = 2'-O-methyladenosine-3'-phosphate ((2S,4R)-1-[29-[[2-(acetylamino)-2-deoxy-beta-D-galactopyra nosyl]oxy]-14,14-bis[[3-[[3-[[5-[[2-(acetylamino)-2-deoxy-b eta-D-galactopyranosyl]oxy]-1-oxopentyl]amino]propyl]amino] -3-oxopropoxy]methyl]-1,12,19,25-tetraoxo-16-oxa-13,20,24-t riazanonacos-1-yl]-4-hydroxy-2-pyrrolidinyl)methyl ester
tgggagagatatgccttcgaa

SEQ ID NO: 1612 - RNA, 21 nt, synthetic construct
  source 1..21: mol_type = other RNA
  modified_base 1: mod_base = OTHER; note = 2'-O-methylcytidine-3'-phosphorothioate
  modified_base 2: mod_base = OTHER; note = 2'-O-methyluridine-3'-phosphorothioate
  modified_base 3: mod_base = OTHER; note = 2'-O-methylcytidine-3'-phosphate
  modified_base 4: mod_base = OTHER; note = 2'-O-methylcytidine-3'-phosphate
  modified_base 5: mod_base = OTHER; note = 2'-O-methyladenosine-3'-phosphate
  modified_base 6: mod_base = OTHER; note = 2'-O-methyluridine-3'-phosphate
  modified_base 7: mod_base = OTHER; note = 2'-O-methylguanosine-3'-phosphate
  modified_base 8: mod_base = OTHER; note = 2'-O-methylguanosine-3'-phosphate
  modified_base 9: mod_base = OTHER; note = 2'-deoxy-2'-fluorocytidine-3'-phosphate
  modified_base 10: mod_base = OTHER; note = 2'-deoxy-2'-fluoroguanosine-3'-phosphate
  modified_base 11: mod_base = OTHER; note = 2'-deoxy-2'-fluoroguanosine-3'-phosphate
  modified_base 12: mod_base = OTHER; note = 2'-O-methylguanosine-3'-phosphate
  modified_base 13: mod_base = OTHER; note = 2'-O-methylguanosine-3'-phosphate
  modified_base 14: mod_base = OTHER; note = 2'-O-methylguanosine-3'-phosphate
  modified_base 15: mod_base = OTHER; note = 2'-O-methyluridine-3'-phosphate
  modified_base 16: mod_base = OTHER; note = 2'-O-methyladenosine-3'-phosphate
  modified_base 17: mod_base = OTHER; note = 2'-O-methyladenosine-3'-phosphate
  modified_base 18: mod_base = OTHER; note = 2'-O-methylcytidine-3'-phosphate
  modified_base 19: mod_base = OTHER; note = 2'-O-methyladenosine-3'-phosphate
  modified_base 20: mod_base = OTHER; note = 2'-O-methyladenosine-3'-phosphate
  modified_base 21: mod_base = OTHER; note = 2'-O-methyladenosine-3'-phosphate ((2S,4R)-1-[29-[[2-(acetylamino)-2-deoxy-beta-D-galactopyra nosyl]oxy]-14,14-bis[[3-[[3-[[5-[[2-(acetylamino)-2-deoxy-b eta-D-galactopyranosyl]oxy]-1-oxopentyl]amino]propyl]amino] -3-oxopropoxy]methyl]-1,12,19,25-tetraoxo-16-oxa-13,20,24-t riazanonacos-1-yl]-4-hydroxy-2-pyrrolidinyl)methyl ester
ctccatggcgggggtaacaaa

SEQ ID NO: 1613 - RNA, 21 nt, synthetic construct
  source 1..21: mol_type = other RNA
  modified_base 1: mod_base = OTHER; note = 2'-O-methyladenosine-3'-phosphorothioate
  modified_base 2: mod_base = OTHER; note = 2'-O-methylguanosine-3'-phosphorothioate
  modified_base 3: mod_base = OTHER; note = 2'-O-methylcytidine-3'-phosphate
  modified_base 4: mod_base = OTHER; note = 2'-O-methyladenosine-3'-phosphate
  modified_base 5: mod_base = OTHER; note = 2'-O-methyluridine-3'-phosphate
  modified_base 6: mod_base = OTHER; note = 2'-O-methylguanosine-3'-phosphate
  modified_base 7: mod_base = OTHER; note = 2'-O-methyladenosine-3'-phosphate
  modified_base 8: mod_base = OTHER; note = 2'-O-methylguanosine-3'-phosphate
  modified_base 9: mod_base = OTHER; note = 2'-deoxy-2'-fluoroguanosine-3'-phosphate
  modified_base 10: mod_base = OTHER; note = 2'-deoxy-2'-fluorouridine-3'-phosphate
  modified_base 11: mod_base = OTHER; note = 2'-deoxy-2'-fluorouridine-3'-phosphate
  modified_base 12: mod_base = OTHER; note = 2'-O-methylcytidine-3'-phosphate
  modified_base 13: mod_base = OTHER; note = 2'-O-methyluridine-3'-phosphate
  modified_base 14: mod_base = OTHER; note = 2'-O-methyluridine-3'-phosphate
  modified_base 15: mod_base = OTHER; note = 2'-O-methyladenosine-3'-phosphate
  modified_base 16: mod_base = OTHER; note = 2'-O-methylguanosine-3'-phosphate
  modified_base 17: mod_base = OTHER; note = 2'-O-methyladenosine-3'-phosphate
  modified_base 18: mod_base = OTHER; note = 2'-O-methyladenosine-3'-phosphate
  modified_base 19: mod_base = OTHER; note = 2'-O-methyluridine-3'-phosphate
  modified_base 20: mod_base = OTHER; note = 2'-O-methylguanosine-3'-phosphate
  modified_base 21: mod_base = OTHER; note = 2'-O-methyluridine-3'-phosphate ((2S,4R)-1-[29-[[2-(acetylamino)-2-deoxy-beta-D-galactopyra nosyl]oxy]-14,14-bis[[3-[[3-[[5-[[2-(acetylamino)-2-deoxy-b eta-D-galactopyranosyl]oxy]-1-oxopentyl]amino]propyl]amino] -3-oxopropoxy]methyl]-1,12,19,25-tetraoxo-16-oxa-13,20,24-t riazanonacos-1-yl]-4-hydroxy-2-pyrrolidinyl)methyl ester
agcatgaggttcttagaatgt

SEQ ID NO: 1614 - RNA, 21 nt, synthetic construct
  source 1..21: mol_type = other RNA
  modified_base 1: mod_base = OTHER; note = 2'-O-methyladenosine-3'-phosphorothioate
  modified_base 2: mod_base = OTHER; note = 2'-O-methylguanosine-3'-phosphorothioate
  modified_base 3: mod_base = OTHER; note = 2'-O-methylguanosine-3'-phosphate
  modified_base 4: mod_base = OTHER; note = 2'-O-methyladenosine-3'-phosphate
  modified_base 5: mod_base = OTHER; note = 2'-O-methyladenosine-3'-phosphate
  modified_base 6: mod_base = OTHER; note = 2'-O-methylguanosine-3'-phosphate
  modified_base 7: mod_base = OTHER; note = 2'-O-methylcytidine-3'-phosphate
  modified_base 8: mod_base = OTHER; note = 2'-O-methyladenosine-3'-phosphate
  modified_base 9: mod_base = OTHER; note = 2'-deoxy-2'-fluoroadenosine-3'-phosphate
  modified_base 10: mod_base = OTHER; note = 2'-deoxy-2'-fluorocytidine-3'-phosphate
  modified_base 11: mod_base = OTHER; note = 2'-deoxy-2'-fluorocytidine-3'-phosphate
  modified_base 12: mod_base = OTHER; note = 2'-O-methyluridine-3'-phosphate
  modified_base 13: mod_base = OTHER; note = 2'-O-methyluridine-3'-phosphate
  modified_base 14: mod_base = OTHER; note = 2'-O-methyluridine-3'-phosphate
  modified_base 15: mod_base = OTHER; note = 2'-O-methylcytidine-3'-phosphate
  modified_base 16: mod_base = OTHER; note = 2'-O-methylguanosine-3'-phosphate
  modified_base 17: mod_base = OTHER; note = 2'-O-methylcytidine-3'-phosphate
  modified_base 18: mod_base = OTHER; note = 2'-O-methylcytidine-3'-phosphate
  modified_base 19: mod_base = OTHER; note = 2'-O-methyluridine-3'-phosphate
  modified_base 20: mod_base = OTHER; note = 2'-O-methylguanosine-3'-phosphate
  modified_base 21: mod_base = OTHER; note = 2'-O-methyluridine-3'-phosphate ((2S,4R)-1-[29-[[2-(acetylamino)-2-deoxy-beta-D-galactopyra nosyl]oxy]-14,14-bis[[3-[[3-[[5-[[2-(acetylamino)-2-deoxy-b eta-D-galactopyranosyl]oxy]-1-oxopentyl]amino]propyl]amino] -3-oxopropoxy]methyl]-1,12,19,25-tetraoxo-16-oxa-13,20,24-t riazanonacos-1-yl]-4-hydroxy-2-pyrrolidinyl)methyl ester
aggaagcaacctttcgcctgt

SEQ ID NO: 1615 - RNA, 21 nt, synthetic construct
  source 1..21: mol_type = other RNA
  modified_base 1: mod_base = OTHER; note = 2'-O-methyluridine-3'-phosphorothioate
  modified_base 2: mod_base = OTHER; note = 2'-O-methyluridine-3'-phosphorothioate
  modified_base 3: mod_base = OTHER; note = 2'-O-methylguanosine-3'-phosphate
  modified_base 4: mod_base = OTHER; note = 2'-O-methylguanosine-3'-phosphate
  modified_base 5: mod_base = OTHER; note = 2'-O-methyluridine-3'-phosphate
  modified_base 6: mod_base = OTHER; note = 2'-O-methyluridine-3'-phosphate
  modified_base 7: mod_base = OTHER; note = 2'-O-methyluridine-3'-phosphate
  modified_base 8: mod_base = OTHER; note = 2'-O-methyluridine-3'-phosphate
  modified_base 9: mod_base = OTHER; note = 2'-deoxy-2'-fluoroadenosine-3'-phosphate
  modified_base 10: mod_base = OTHER; note = 2'-deoxy-2'-fluorouridine-3'-phosphate
  modified_base 11: mod_base = OTHER; note = 2'-deoxy-2'-fluoroguanosine-3'-phosphate
  modified_base 12: mod_base = OTHER; note = 2'-O-methyladenosine-3'-phosphate
  modified_base 13: mod_base = OTHER; note = 2'-O-methyladenosine-3'-phosphate
  modified_base 14: mod_base = OTHER; note = 2'-O-methyladenosine-3'-phosphate
  modified_base 15: mod_base = OTHER; note = 2'-O-methyladenosine-3'-phosphate
  modified_base 16: mod_base = OTHER; note = 2'-O-methylguanosine-3'-phosphate
  modified_base 17: mod_base = OTHER; note = 2'-O-methylcytidine-3'-phosphate
  modified_base 18: mod_base = OTHER; note = 2'-O-methyluridine-3'-phosphate
  modified_base 19: mod_base = OTHER; note = 2'-O-methyladenosine-3'-phosphate
  modified_base 20: mod_base = OTHER; note = 2'-O-methylguanosine-3'-phosphate
  modified_base 21: mod_base = OTHER; note = 2'-O-methyladenosine-3'-phosphate ((2S,4R)-1-[29-[[2-(acetylamino)-2-deoxy-beta-D-galactopyra nosyl]oxy]-14,14-bis[[3-[[3-[[5-[[2-(acetylamino)-2-deoxy-b eta-D-galactopyranosyl]oxy]-1-oxopentyl]amino]propyl]amino] -3-oxopropoxy]methyl]-1,12,19,25-tetraoxo-16-oxa-13,20,24-t riazanonacos-1-yl]-4-hydroxy-2-pyrrolidinyl)methyl ester
ttggttttatgaaaagctaga

SEQ ID NO: 1616 - RNA, 21 nt, synthetic construct
  source 1..21: mol_type = other RNA
  modified_base 1: mod_base = OTHER; note = 2'-O-methyladenosine-3'-phosphorothioate
  modified_base 2: mod_base = OTHER; note = 2'-O-methyluridine-3'-phosphorothioate
  modified_base 3: mod_base = OTHER; note = 2'-O-methyluridine-3'-phosphate
  modified_base 4: mod_base = OTHER; note = 2'-O-methyladenosine-3'-phosphate
  modified_base 5: mod_base = OTHER; note = 2'-O-methylguanosine-3'-phosphate
  modified_base 6: mod_base = OTHER; note = 2'-O-methylguanosine-3'-phosphate
  modified_base 7: mod_base = OTHER; note = 2'-O-methyladenosine-3'-phosphate
  modified_base 8: mod_base = OTHER; note = 2'-O-methyluridine-3'-phosphate
  modified_base 9: mod_base = OTHER; note = 2'-deoxy-2'-fluoroadenosine-3'-phosphate
  modified_base 10: mod_base = OTHER; note = 2'-deoxy-2'-fluoroadenosine-3'-phosphate
  modified_base 11: mod_base = OTHER; note = 2'-deoxy-2'-fluorouridine-3'-phosphate
  modified_base 12: mod_base = OTHER; note = 2'-O-methylguanosine-3'-phosphate
  modified_base 13: mod_base = OTHER; note = 2'-O-methyluridine-3'-phosphate
  modified_base 14: mod_base = OTHER; note = 2'-O-methylcytidine-3'-phosphate
  modified_base 15: mod_base = OTHER; note = 2'-O-methyluridine-3'-phosphate
  modified_base 16: mod_base = OTHER; note = 2'-O-methyluridine-3'-phosphate
  modified_base 17: mod_base = OTHER; note = 2'-O-methyladenosine-3'-phosphate
  modified_base 18: mod_base = OTHER; note = 2'-O-methyluridine-3'-phosphate
  modified_base 19: mod_base = OTHER; note = 2'-O-methylguanosine-3'-phosphate
  modified_base 20: mod_base = OTHER; note = 2'-O-methyluridine-3'-phosphate
  modified_base 21: mod_base = OTHER; note = 2'-O-methyladenosine-3'-phosphate ((2S,4R)-1-[29-[[2-(acetylamino)-2-deoxy-beta-D-galactopyra nosyl]oxy]-14,14-bis[[3-[[3-[[5-[[2-(acetylamino)-2-deoxy-b eta-D-galactopyranosyl]oxy]-1-oxopentyl]amino]propyl]amino] -3-oxopropoxy]methyl]-1,12,19,25-tetraoxo-16-oxa-13,20,24-t riazanonacos-1-yl]-4-hydroxy-2-pyrrolidinyl)methyl ester
attaggataatgtcttatgta

SEQ ID NO: 1617 - RNA, 21 nt, synthetic construct
  source 1..21: mol_type = other RNA
  modified_base 1: mod_base = OTHER; note = 2'-O-methyluridine-3'-phosphorothioate
  modified_base 2: mod_base = OTHER; note = 2'-O-methylcytidine-3'-phosphorothioate
  modified_base 3: mod_base = OTHER; note = 2'-O-methyladenosine-3'-phosphate
  modified_base 4: mod_base = OTHER; note = 2'-O-methylcytidine-3'-phosphate
  modified_base 5: mod_base = OTHER; note = 2'-O-methyluridine-3'-phosphate
  modified_base 6: mod_base = OTHER; note = 2'-O-methyluridine-3'-phosphate
  modified_base 7: mod_base = OTHER; note = 2'-O-methylguanosine-3'-phosphate
  modified_base 8: mod_base = OTHER; note = 2'-O-methyladenosine-3'-phosphate
  modified_base 9: mod_base = OTHER; note = 2'-deoxy-2'-fluoroguanosine-3'-phosphate
  modified_base 10: mod_base = OTHER; note = 2'-deoxy-2'-fluoroguanosine-3'-phosphate
  modified_base 11: mod_base = OTHER; note = 2'-deoxy-2'-fluoroadenosine-3'-phosphate
  modified_base 12: mod_base = OTHER; note = 2'-O-methylguanosine-3'-phosphate
  modified_base 13: mod_base = OTHER; note = 2'-O-methylguanosine-3'-phosphate
  modified_base 14: mod_base = OTHER; note = 2'-O-methylcytidine-3'-phosphate
  modified_base 15: mod_base = OTHER; note = 2'-O-methylguanosine-3'-phosphate
  modified_base 16: mod_base = OTHER; note = 2'-O-methyladenosine-3'-phosphate
  modified_base 17: mod_base = OTHER; note = 2'-O-methylguanosine-3'-phosphate
  modified_base 18: mod_base = OTHER; note = 2'-O-methyluridine-3'-phosphate
  modified_base 19: mod_base = OTHER; note = 2'-O-methylcytidine-3'-phosphate
  modified_base 20: mod_base = OTHER; note = 2'-O-methyluridine-3'-phosphate
  modified_base 21: mod_base = OTHER; note = 2'-O-methyladenosine-3'-phosphate ((2S,4R)-1-[29-[[2-(acetylamino)-2-deoxy-beta-D-galactopyra nosyl]oxy]-14,14-bis[[3-[[3-[[5-[[2-(acetylamino)-2-deoxy-b eta-D-galactopyranosyl]oxy]-1-oxopentyl]amino]propyl]amino] -3-oxopropoxy]methyl]-1,12,19,25-tetraoxo-16-oxa-13,20,24-t riazanonacos-1-yl]-4-hydroxy-2-pyrrolidinyl)methyl ester
tcacttgaggaggcgagtcta

SEQ ID NO: 1618 - RNA, 21 nt, synthetic construct
  source 1..21: mol_type = other RNA
  modified_base 1: mod_base = OTHER; note = 2'-O-methylcytidine-3'-phosphorothioate
  modified_base 2: mod_base = OTHER; note = 2'-O-methyladenosine-3'-phosphorothioate
  modified_base 3: mod_base = OTHER; note = 2'-O-methyladenosine-3'-phosphate
  modified_base 4: mod_base = OTHER; note = 2'-O-methylguanosine-3'-phosphate
  modified_base 5: mod_base = OTHER; note = 2'-O-methyladenosine-3'-phosphate
  modified_base 6: mod_base = OTHER; note = 2'-O-methyluridine-3'-phosphate
  modified_base 7: mod_base = OTHER; note = 2'-O-methyluridine-3'-phosphate
  modified_base 8: mod_base = OTHER; note = 2'-O-methyluridine-3'-phosphate
  modified_base 9: mod_base = OTHER; note = 2'-deoxy-2'-fluoroguanosine-3'-phosphate
  modified_base 10: mod_base = OTHER; note = 2'-deoxy-2'-fluorocytidine-3'-phosphate
  modified_base 11: mod_base = OTHER; note = 2'-deoxy-2'-fluoroadenosine-3'-phosphate
  modified_base 12: mod_base = OTHER; note = 2'-O-methyladenosine-3'-phosphate
  modified_base 13: mod_base = OTHER; note = 2'-O-methylcytidine-3'-phosphate
  modified_base 14: mod_base = OTHER; note = 2'-O-methyluridine-3'-phosphate
  modified_base 15: mod_base = OTHER; note = 2'-O-methyluridine-3'-phosphate
  modified_base 16: mod_base = OTHER; note = 2'-O-methylguanosine-3'-phosphate
  modified_base 17: mod_base = OTHER; note = 2'-O-methylcytidine-3'-phosphate
  modified_base 18: mod_base = OTHER; note = 2'-O-methyluridine-3'-phosphate
  modified_base 19: mod_base = OTHER; note = 2'-O-methyladenosine-3'-phosphate
  modified_base 20: mod_base = OTHER; note = 2'-O-methylcytidine-3'-phosphate
  modified_base 21: mod_base = OTHER; note = 2'-O-methyladenosine-3'-phosphate ((2S,4R)-1-[29-[[2-(acetylamino)-2-deoxy-beta-D-galactopyra nosyl]oxy]-14,14-bis[[3-[[3-[[5-[[2-(acetylamino)-2-deoxy-b eta-D-galactopyranosyl]oxy]-1-oxopentyl]amino]propyl]amino] -3-oxopropoxy]methyl]-1,12,19,25-tetraoxo-16-oxa-13,20,24-t riazanonacos-1-yl]-4-hydroxy-2-pyrrolidinyl)methyl ester
caagatttgcaacttgctaca

SEQ ID NO: 1619 - RNA, 21 nt, synthetic construct
  source 1..21: mol_type = other RNA
  modified_base 1: mod_base = OTHER; note = 2'-O-methyluridine-3'-phosphorothioate
  modified_base 2: mod_base = OTHER; note = 2'-O-methylguanosine-3'-phosphorothioate
  modified_base 3: mod_base = OTHER; note = 2'-O-methylcytidine-3'-phosphate
  modified_base 4: mod_base = OTHER; note = 2'-O-methylcytidine-3'-phosphate
  modified_base 5: mod_base = OTHER; note = 2'-O-methyladenosine-3'-phosphate
  modified_base 6: mod_base = OTHER; note = 2'-O-methyladenosine-3'-phosphate
  modified_base 7: mod_base = OTHER; note = 2'-O-methyladenosine-3'-phosphate
  modified_base 8: mod_base = OTHER; note = 2'-O-methyladenosine-3'-phosphate
  modified_base 9: mod_base = OTHER; note = 2'-deoxy-2'-fluorocytidine-3'-phosphate
  modified_base 10: mod_base = OTHER; note = 2'-deoxy-2'-fluoroadenosine-3'-phosphate
  modified_base 11: mod_base = OTHER; note = 2'-deoxy-2'-fluoroadenosine-3'-phosphate
  modified_base 12: mod_base = OTHER; note = 2'-O-methylcytidine-3'-phosphate
  modified_base 13: mod_base = OTHER; note = 2'-O-methylcytidine-3'-phosphate
  modified_base 14: mod_base = OTHER; note = 2'-O-methyladenosine-3'-phosphate
  modified_base 15: mod_base = OTHER; note = 2'-O-methyluridine-3'-phosphate
  modified_base 16: mod_base = OTHER; note = 2'-O-methylcytidine-3'-phosphate
  modified_base 17: mod_base = OTHER; note = 2'-O-methyladenosine-3'-phosphate
  modified_base 18: mod_base = OTHER; note = 2'-O-methylcytidine-3'-phosphate
  modified_base 19: mod_base = OTHER; note = 2'-O-methylcytidine-3'-phosphate
  modified_base 20: mod_base = OTHER; note = 2'-O-methylguanosine-3'-phosphate
  modified_base 21: mod_base = OTHER; note = 2'-O-methyluridine-3'-phosphate ((2S,4R)-1-[29-[[2-(acetylamino)-2-deoxy-beta-D-galactopyra nosyl]oxy]-14,14-bis[[3-[[3-[[5-[[2-(acetylamino)-2-deoxy-b eta-D-galactopyranosyl]oxy]-1-oxopentyl]amino]propyl]amino] -3-oxopropoxy]methyl]-1,12,19,25-tetraoxo-16-oxa-13,20,24-t riazanonacos-1-yl]-4-hydroxy-2-pyrrolidinyl)methyl ester
tgccaaaacaaccatcaccgt

SEQ ID NO: 1620 - RNA, 21 nt, synthetic construct
  source 1..21: mol_type = other RNA
  modified_base 1: mod_base = OTHER; note = 2'-O-methylcytidine-3'-phosphorothioate
  modified_base 2: mod_base = OTHER; note = 2'-O-methylcytidine-3'-phosphorothioate
  modified_base 3: mod_base = OTHER; note = 2'-O-methyladenosine-3'-phosphate
  modified_base 4: mod_base = OTHER; note = 2'-O-methyluridine-3'-phosphate
  modified_base 5: mod_base = OTHER; note = 2'-O-methyluridine-3'-phosphate
  modified_base 6: mod_base = OTHER; note = 2'-O-methyladenosine-3'-phosphate
  modified_base 7: mod_base = OTHER; note = 2'-O-methylguanosine-3'-phosphate
  modified_base 8: mod_base = OTHER; note = 2'-O-methylguanosine-3'-phosphate
  modified_base 9: mod_base = OTHER; note = 2'-deoxy-2'-fluoroadenosine-3'-phosphate
  modified_base 10: mod_base = OTHER; note = 2'-deoxy-2'-fluorouridine-3'-phosphate
  modified_base 11: mod_base = OTHER; note = 2'-deoxy-2'-fluoroadenosine-3'-phosphate
  modified_base 12: mod_base = OTHER; note = 2'-O-methyladenosine-3'-phosphate
  modified_base 13: mod_base = OTHER; note = 2'-O-methyluridine-3'-phosphate
  modified_base 14: mod_base = OTHER; note = 2'-O-methylguanosine-3'-phosphate
  modified_base 15: mod_base = OTHER; note = 2'-O-methyluridine-3'-phosphate
  modified_base 16: mod_base = OTHER; note = 2'-O-methylcytidine-3'-phosphate
  modified_base 17: mod_base = OTHER; note = 2'-O-methyluridine-3'-phosphate
  modified_base 18: mod_base = OTHER; note = 2'-O-methyluridine-3'-phosphate
  modified_base 19: mod_base = OTHER; note = 2'-O-methyladenosine-3'-phosphate
  modified_base 20: mod_base = OTHER; note = 2'-O-methyluridine-3'-phosphate
  modified_base 21: mod_base = OTHER; note = 2'-O-methyluridine-3'-phosphate ((2S,4R)-1-[29-[[2-(acetylamino)-2-deoxy-beta-D-galactopyra nosyl]oxy]-14,14-bis[[3-[[3-[[5-[[2-(acetylamino)-2-deoxy-b eta-D-galactopyranosyl]oxy]-1-oxopentyl]amino]propyl]amino] -3-oxopropoxy]methyl]-1,12,19,25-tetraoxo-16-oxa-13,20,24-t riazanonacos-1-yl]-4-hydroxy-2-pyrrolidinyl)methyl ester
ccattaggataatgtcttatt

SEQ ID NO: 1621 - RNA, 21 nt, synthetic construct
  source 1..21: mol_type = other RNA
  modified_base 1: mod_base = OTHER; note = 2'-O-methyluridine-3'-phosphorothioate
  modified_base 2: mod_base = OTHER; note = 2'-O-methyluridine-3'-phosphorothioate
  modified_base 3: mod_base = OTHER; note = 2'-O-methyladenosine-3'-phosphate
  modified_base 4: mod_base = OTHER; note = 2'-O-methylcytidine-3'-phosphate
  modified_base 5: mod_base = OTHER; note = 2'-O-methylcytidine-3'-phosphate
  modified_base 6: mod_base = OTHER; note = 2'-O-methyluridine-3'-phosphate
  modified_base 7: mod_base = OTHER; note = 2'-O-methylguanosine-3'-phosphate
  modified_base 8: mod_base = OTHER; note = 2'-O-methyluridine-3'-phosphate
  modified_base 9: mod_base = OTHER; note = 2'-deoxy-2'-fluorouridine-3'-phosphate
  modified_base 10: mod_base = OTHER; note = 2'-deoxy-2'-fluoroguanosine-3'-phosphate
  modified_base 11: mod_base = OTHER; note = 2'-deoxy-2'-fluoroadenosine-3'-phosphate
  modified_base 12: mod_base = OTHER; note = 2'-O-methyladenosine-3'-phosphate
  modified_base 13: mod_base = OTHER; note = 2'-O-methyluridine-3'-phosphate
  modified_base 14: mod_base = OTHER; note = 2'-O-methyluridine-3'-phosphate
  modified_base 15: mod_base = OTHER; note = 2'-O-methyluridine-3'-phosphate
  modified_base 16: mod_base = OTHER; note = 2'-O-methyluridine-3'-phosphate
  modified_base 17: mod_base = OTHER; note = 2'-O-methylguanosine-3'-phosphate
  modified_base 18: mod_base = OTHER; note = 2'-O-methyluridine-3'-phosphate
  modified_base 19: mod_base = OTHER; note = 2'-O-methyladenosine-3'-phosphate
  modified_base 20: mod_base = OTHER; note = 2'-O-methyluridine-3'-phosphate
  modified_base 21: mod_base = OTHER; note = 2'-O-methyluridine-3'-phosphate ((2S,4R)-1-[29-[[2-(acetylamino)-2-deoxy-beta-D-galactopyra nosyl]oxy]-14,14-bis[[3-[[3-[[5-[[2-(acetylamino)-2-deoxy-b eta-D-galactopyranosyl]oxy]-1-oxopentyl]amino]propyl]amino] -3-oxopropoxy]methyl]-1,12,19,25-tetraoxo-16-oxa-13,20,24-t riazanonacos-1-yl]-4-hydroxy-2-pyrrolidinyl)methyl ester
ttacctgttgaattttgtatt

SEQ ID NO: 1622 - RNA, 21 nt, synthetic construct
  source 1..21: mol_type = other RNA
  modified_base 1: mod_base = OTHER; note = 2'-O-methyluridine-3'-phosphorothioate
  modified_base 2: mod_base = OTHER; note = 2'-O-methylguanosine-3'-phosphorothioate
  modified_base 3: mod_base = OTHER; note = 2'-O-methylcytidine-3'-phosphate
  modified_base 4: mod_base = OTHER; note = 2'-O-methylcytidine-3'-phosphate
  modified_base 5: mod_base = OTHER; note = 2'-O-methyladenosine-3'-phosphate
  modified_base 6: mod_base = OTHER; note = 2'-O-methyladenosine-3'-phosphate
  modified_base 7: mod_base = OTHER; note = 2'-deoxy-2'-fluoroadenosine-3'-phosphate
  modified_base 8: mod_base = OTHER; note = 2'-O-methyladenosine-3'-phosphate
  modified_base 9: mod_base = OTHER; note = 2'-deoxy-2'-fluorocytidine-3'-phosphate
  modified_base 10: mod_base = OTHER; note = 2'-deoxy-2'-fluoroadenosine-3'-phosphate
  modified_base 11: mod_base = OTHER; note = 2'-deoxy-2'-fluoroadenosine-3'-phosphate
  modified_base 12: mod_base = OTHER; note = 2'-O-methylcytidine-3'-phosphate
  modified_base 13: mod_base = OTHER; note = 2'-O-methylcytidine-3'-phosphate
  modified_base 14: mod_base = OTHER; note = 2'-O-methyladenosine-3'-phosphate
  modified_base 15: mod_base = OTHER; note = 2'-O-methyluridine-3'-phosphate
  modified_base 16: mod_base = OTHER; note = 2'-O-methylcytidine-3'-phosphate
  modified_base 17: mod_base = OTHER; note = 2'-O-methyladenosine-3'-phosphate
  modified_base 18: mod_base = OTHER; note = 2'-O-methylcytidine-3'-phosphate
  modified_base 19: mod_base = OTHER; note = 2'-O-methylcytidine-3'-phosphate
  modified_base 20: mod_base = OTHER; note = 2'-O-methylguanosine-3'-phosphate
  modified_base 21: mod_base = OTHER; note = 2'-O-methyluridine-3'-phosphate ((2S,4R)-1-[29-[[2-(acetylamino)-2-deoxy-beta-D-galactopyra nosyl]oxy]-14,14-bis[[3-[[3-[[5-[[2-(acetylamino)-2-deoxy-b eta-D-galactopyranosyl]oxy]-1-oxopentyl]amino]propyl]amino] -3-oxopropoxy]methyl]-1,12,19,25-tetraoxo-16-oxa-13,20,24-t riazanonacos-1-yl]-4-hydroxy-2-pyrrolidinyl)methyl ester
tgccaaaacaaccatcaccgt

SEQ ID NO: 1623 - RNA, 21 nt, synthetic construct
  source 1..21: mol_type = other RNA
  modified_base 1: mod_base = OTHER; note = 2'-O-methylcytidine-3'-phosphorothioate
  modified_base 2: mod_base = OTHER; note = 2'-O-methylcytidine-3'-phosphorothioate
  modified_base 3: mod_base = OTHER; note = 2'-O-methyladenosine-3'-phosphate
  modified_base 4: mod_base = OTHER; note = 2'-O-methyluridine-3'-phosphate
  modified_base 5: mod_base = OTHER; note = 2'-O-methyluridine-3'-phosphate
  modified_base 6: mod_base = OTHER; note = 2'-O-methyladenosine-3'-phosphate
  modified_base 7: mod_base = OTHER; note = 2'-deoxy-2'-fluoroguanosine-3'-phosphate
  modified_base 8: mod_base = OTHER; note = 2'-O-methylguanosine-3'-phosphate
  modified_base 9: mod_base = OTHER; note = 2'-deoxy-2'-fluoroadenosine-3'-phosphate
  modified_base 10: mod_base = OTHER; note = 2'-deoxy-2'-fluorouridine-3'-phosphate
  modified_base 11: mod_base = OTHER; note = 2'-deoxy-2'-fluoroadenosine-3'-phosphate
  modified_base 12: mod_base = OTHER; note = 2'-O-methyladenosine-3'-phosphate
  modified_base 13: mod_base = OTHER; note = 2'-O-methyluridine-3'-phosphate
  modified_base 14: mod_base = OTHER; note = 2'-O-methylguanosine-3'-phosphate
  modified_base 15: mod_base = OTHER; note = 2'-O-methyluridine-3'-phosphate
  modified_base 16: mod_base = OTHER; note = 2'-O-methylcytidine-3'-phosphate
  modified_base 17: mod_base = OTHER; note = 2'-O-methyluridine-3'-phosphate
  modified_base 18: mod_base = OTHER; note = 2'-O-methyluridine-3'-phosphate
  modified_base 19: mod_base = OTHER; note = 2'-O-methyladenosine-3'-phosphate
  modified_base 20: mod_base = OTHER; note = 2'-O-methyluridine-3'-phosphate
  modified_base 21: mod_base = OTHER; note = 2'-O-methyluridine-3'-phosphate ((2S,4R)-1-[29-[[2-(acetylamino)-2-deoxy-beta-D-galactopyra nosyl]oxy]-14,14-bis[[3-[[3-[[5-[[2-(acetylamino)-2-deoxy-b eta-D-galactopyranosyl]oxy]-1-oxopentyl]amino]propyl]amino] -3-oxopropoxy]methyl]-1,12,19,25-tetraoxo-16-oxa-13,20,24-t riazanonacos-1-yl]-4-hydroxy-2-pyrrolidinyl)methyl ester
ccattaggataatgtcttatt

SEQ ID NO: 1624 - RNA, 21 nt, synthetic construct
  source 1..21: mol_type = other RNA
  modified_base 1: mod_base = OTHER; note = 2'-O-methyluridine-3'-phosphorothioate
  modified_base 2: mod_base = OTHER; note = 2'-O-methyladenosine-3'-phosphorothioate
  modified_base 3: mod_base = OTHER; note = 2'-O-methylguanosine-3'-phosphate
  modified_base 4: mod_base = OTHER; note = 2'-O-methylguanosine-3'-phosphate
  modified_base 5: mod_base = OTHER; note = 2'-O-methyladenosine-3'-phosphate
  modified_base 6: mod_base = OTHER; note = 2'-O-methyluridine-3'-phosphate
  modified_base 7: mod_base = OTHER; note = 2'-deoxy-2'-fluoroadenosine-3'-phosphate
  modified_base 8: mod_base = OTHER; note = 2'-O-methyladenosine-3'-phosphate
  modified_base 9: mod_base = OTHER; note = 2'-deoxy-2'-fluorouridine-3'-phosphate
  modified_base 10: mod_base = OTHER; note = 2'-deoxy-2'-fluoroguanosine-3'-phosphate
  modified_base 11: mod_base = OTHER; note = 2'-deoxy-2'-fluorouridine-3'-phosphate
  modified_base 12: mod_base = OTHER; note = 2'-O-methylcytidine-3'-phosphate
  modified_base 13: mod_base = OTHER; note = 2'-O-methyluridine-3'-phosphate
  modified_base 14: mod_base = OTHER; note = 2'-O-methyluridine-3'-phosphate
  modified_base 15: mod_base = OTHER; note = 2'-O-methyladenosine-3'-phosphate
  modified_base 16: mod_base = OTHER; note = 2'-O-methyluridine-3'-phosphate
  modified_base 17: mod_base = OTHER; note = 2'-O-methylguanosine-3'-phosphate
  modified_base 18: mod_base = OTHER; note = 2'-O-methyluridine-3'-phosphate
  modified_base 19: mod_base = OTHER; note = 2'-O-methyladenosine-3'-phosphate
  modified_base 20: mod_base = OTHER; note = 2'-O-methyladenosine-3'-phosphate
  modified_base 21: mod_base = OTHER; note = 2'-O-methyluridine-3'-phosphate ((2S,4R)-1-[29-[[2-(acetylamino)-2-deoxy-beta-D-galactopyra nosyl]oxy]-14,14-bis[[3-[[3-[[5-[[2-(acetylamino)-2-deoxy-b eta-D-galactopyranosyl]oxy]-1-oxopentyl]amino]propyl]amino] -3-oxopropoxy]methyl]-1,12,19,25-tetraoxo-16-oxa-13,20,24-t riazanonacos-1-yl]-4-hydroxy-2-pyrrolidinyl)methyl ester
taggataatgtcttatgtaat

SEQ ID NO: 1625 - RNA, 21 nt, synthetic construct
  source 1..21: mol_type = other RNA
  modified_base 1: mod_base = OTHER; note = 2'-O-methyladenosine-3'-phosphorothioate
  modified_base 2: mod_base = OTHER; note = 2'-O-methyluridine-3'-phosphorothioate
  modified_base 3: mod_base = OTHER; note = 2'-O-methyladenosine-3'-phosphate
  modified_base 4: mod_base = OTHER; note = 2'-O-methyladenosine-3'-phosphate
  modified_base 5: mod_base = OTHER; note = 2'-O-methyluridine-3'-phosphate
  modified_base 6: mod_base = OTHER; note = 2'-O-methylguanosine-3'-phosphate
  modified_base 7: mod_base = OTHER; note = 2'-deoxy-2'-fluorouridine-3'-phosphate
  modified_base 8: mod_base = OTHER; note = 2'-O-methylcytidine-3'-phosphate
  modified_base 9: mod_base = OTHER; note = 2'-deoxy-2'-fluorouridine-3'-phosphate
  modified_base 10: mod_base = OTHER; note = 2'-deoxy-2'-fluorouridine-3'-phosphate
  modified_base 11: mod_base = OTHER; note = 2'-deoxy-2'-fluoroadenosine-3'-phosphate
  modified_base 12: mod_base = OTHER; note = 2'-O-methyluridine-3'-phosphate
  modified_base 13: mod_base = OTHER; note = 2'-O-methylguanosine-3'-phosphate
  modified_base 14: mod_base = OTHER; note = 2'-O-methyluridine-3'-phosphate
  modified_base 15: mod_base = OTHER; note = 2'-O-methyladenosine-3'-phosphate
  modified_base 16: mod_base = OTHER; note = 2'-O-methyladenosine-3'-phosphate
  modified_base 17: mod_base = OTHER; note = 2'-O-methyluridine-3'-phosphate
  modified_base 18: mod_base = OTHER; note = 2'-O-methylguanosine-3'-phosphate
  modified_base 19: mod_base = OTHER; note = 2'-O-methylcytidine-3'-phosphate
  modified_base 20: mod_base = OTHER; note = 2'-O-methyluridine-3'-phosphate
  modified_base 21: mod_base = OTHER; note = 2'-O-methyluridine-3'-phosphate ((2S,4R)-1-[29-[[2-(acetylamino)-2-deoxy-beta-D-galactopyra nosyl]oxy]-14,14-bis[[3-[[3-[[5-[[2-(acetylamino)-2-deoxy-b eta-D-galactopyranosyl]oxy]-1-oxopentyl]amino]propyl]amino] -3-oxopropoxy]methyl]-1,12,19,25-tetraoxo-16-oxa-13,20,24-t riazanonacos-1-yl]-4-hydroxy-2-pyrrolidinyl)methyl ester
ataatgtcttatgtaatgctt

SEQ ID NO: 1626 - RNA, 21 nt, synthetic construct
  source 1..21: mol_type = other RNA
  modified_base 1: mod_base = OTHER; note = 2'-O-methyladenosine-3'-phosphorothioate
  modified_base 2: mod_base = OTHER; note = 2'-O-methylguanosine-3'-phosphorothioate
  modified_base 3: mod_base = OTHER; note = 2'-O-methylguanosine-3'-phosphate
  modified_base 4: mod_base = OTHER; note = 2'-O-methyladenosine-3'-phosphate
  modified_base 5: mod_base = OTHER; note = 2'-O-methyladenosine-3'-phosphate
  modified_base 6: mod_base = OTHER; note = 2'-O-methylguanosine-3'-phosphate
  modified_base 7: mod_base = OTHER; note = 2'-deoxy-2'-fluorocytidine-3'-phosphate
  modified_base 8: mod_base = OTHER; note = 2'-O-methyladenosine-3'-phosphate
  modified_base 9: mod_base = OTHER; note = 2'-deoxy-2'-fluoroadenosine-3'-phosphate
  modified_base 10: mod_base = OTHER; note = 2'-deoxy-2'-fluorocytidine-3'-phosphate
  modified_base 11: mod_base = OTHER; note = 2'-deoxy-2'-fluorocytidine-3'-phosphate
  modified_base 12: mod_base = OTHER; note = 2'-O-methyluridine-3'-phosphate
  modified_base 13: mod_base = OTHER; note = 2'-O-methyluridine-3'-phosphate
  modified_base 14: mod_base = OTHER; note = 2'-O-methyluridine-3'-phosphate
  modified_base 15: mod_base = OTHER; note = 2'-O-methylcytidine-3'-phosphate
  modified_base 16: mod_base = OTHER; note = 2'-O-methylguanosine-3'-phosphate
  modified_base 17: mod_base = OTHER; note = 2'-O-methylcytidine-3'-phosphate
  modified_base 18: mod_base = OTHER; note = 2'-O-methylcytidine-3'-phosphate
  modified_base 19: mod_base = OTHER; note = 2'-O-methyluridine-3'-phosphate
  modified_base 20: mod_base = OTHER; note = 2'-O-methylguanosine-3'-phosphate
  modified_base 21: mod_base = OTHER; note = 2'-O-methyluridine-3'-phosphate ((2S,4R)-1-[29-[[2-(acetylamino)-2-deoxy-beta-D-galactopyra nosyl]oxy]-14,14-bis[[3-[[3-[[5-[[2-(acetylamino)-2-deoxy-b eta-D-galactopyranosyl]oxy]-1-oxopentyl]amino]propyl]amino] -3-oxopropoxy]methyl]-1,12,19,25-tetraoxo-16-oxa-13,20,24-t riazanonacos-1-yl]-4-hydroxy-2-pyrrolidinyl)methyl ester
aggaagcaacctttcgcctgt

SEQ ID NO: 1627 - RNA, 21 nt, synthetic construct
  source 1..21: mol_type = other RNA
  modified_base 1: mod_base = OTHER; note = 2'-O-methyladenosine-3'-phosphorothioate
  modified_base 2: mod_base = OTHER; note = 2'-O-methylguanosine-3'-phosphorothioate
  modified_base 3: mod_base = OTHER; note = 2'-O-methylcytidine-3'-phosphate
  modified_base 4: mod_base = OTHER; note = 2'-O-methyladenosine-3'-phosphate
  modified_base 5: mod_base = OTHER; note = 2'-O-methyluridine-3'-phosphate
  modified_base 6: mod_base = OTHER; note = 2'-O-methylguanosine-3'-phosphate
  modified_base 7: mod_base = OTHER; note = 2'-deoxy-2'-fluoroadenosine-3'-phosphate
  modified_base 8: mod_base = OTHER; note = 2'-O-methylguanosine-3'-phosphate
  modified_base 9: mod_base = OTHER; note = 2'-deoxy-2'-fluoroguanosine-3'-phosphate
  modified_base 10: mod_base = OTHER; note = 2'-deoxy-2'-fluorouridine-3'-phosphate
  modified_base 11: mod_base = OTHER; note = 2'-deoxy-2'-fluorouridine-3'-phosphate
  modified_base 12: mod_base = OTHER; note = 2'-O-methylcytidine-3'-phosphate
  modified_base 13: mod_base = OTHER; note = 2'-O-methyluridine-3'-phosphate
  modified_base 14: mod_base = OTHER; note = 2'-O-methyluridine-3'-phosphate
  modified_base 15: mod_base = OTHER; note = 2'-O-methyladenosine-3'-phosphate
  modified_base 16: mod_base = OTHER; note = 2'-O-methylguanosine-3'-phosphate
  modified_base 17: mod_base = OTHER; note = 2'-O-methyladenosine-3'-phosphate
  modified_base 18: mod_base = OTHER; note = 2'-O-methyladenosine-3'-phosphate
  modified_base 19: mod_base = OTHER; note = 2'-O-methyluridine-3'-phosphate
  modified_base 20: mod_base = OTHER; note = 2'-O-methylguanosine-3'-phosphate
  modified_base 21: mod_base = OTHER; note = 2'-O-methyluridine-3'-phosphate ((2S,4R)-1-[29-[[2-(acetylamino)-2-deoxy-beta-D-galactopyra nosyl]oxy]-14,14-bis[[3-[[3-[[5-[[2-(acetylamino)-2-deoxy-b eta-D-galactopyranosyl]oxy]-1-oxopentyl]amino]propyl]amino] -3-oxopropoxy]methyl]-1,12,19,25-tetraoxo-16-oxa-13,20,24-t riazanonacos-1-yl]-4-hydroxy-2-pyrrolidinyl)methyl ester
agcatgaggttcttagaatgt

SEQ ID NO: 1628 - RNA, 21 nt, synthetic construct
  source 1..21: mol_type = other RNA
  modified_base 1: mod_base = OTHER; note = 2'-O-methyluridine-3'-phosphorothioate
  modified_base 2: mod_base = OTHER; note = 2'-O-methyluridine-3'-phosphorothioate
  modified_base 3: mod_base = OTHER; note = 2'-O-methyluridine-3'-phosphate
  modified_base 4: mod_base = OTHER; note = 2'-O-methyluridine-3'-phosphate
  modified_base 5: mod_base = OTHER; note = 2'-O-methyladenosine-3'-phosphate
  modified_base 6: mod_base = OTHER; note = 2'-O-methylguanosine-3'-phosphate
  modified_base 7: mod_base = OTHER; note = 2'-deoxy-2'-fluoroadenosine-3'-phosphate
  modified_base 8: mod_base = OTHER; note = 2'-O-methyladenosine-3'-phosphate
  modified_base 9: mod_base = OTHER; note = 2'-deoxy-2'-fluorocytidine-3'-phosphate
  modified_base 10: mod_base = OTHER; note = 2'-deoxy-2'-fluoroadenosine-3'-phosphate
  modified_base 11: mod_base = OTHER; note = 2'-deoxy-2'-fluorocytidine-3'-phosphate
  modified_base 12: mod_base = OTHER; note = 2'-O-methylcytidine-3'-phosphate
  modified_base 13: mod_base = OTHER; note = 2'-O-methyluridine-3'-phosphate
  modified_base 14: mod_base = OTHER; note = 2'-O-methyluridine-3'-phosphate
  modified_base 15: mod_base = OTHER; note = 2'-O-methyluridine-3'-phosphate
  modified_base 16: mod_base = OTHER; note = 2'-O-methyluridine-3'-phosphate
  modified_base 17: mod_base = OTHER; note = 2'-O-methyluridine-3'-phosphate
  modified_base 18: mod_base = OTHER; note = 2'-O-methylcytidine-3'-phosphate
  modified_base 19: mod_base = OTHER; note = 2'-O-methyladenosine-3'-phosphate
  modified_base 20: mod_base = OTHER; note = 2'-O-methylcytidine-3'-phosphate
  modified_base 21: mod_base = OTHER; note = 2'-O-methyluridine-3'-phosphate ((2S,4R)-1-[29-[[2-(acetylamino)-2-deoxy-beta-D-galactopyra nosyl]oxy]-14,14-bis[[3-[[3-[[5-[[2-(acetylamino)-2-deoxy-b eta-D-galactopyranosyl]oxy]-1-oxopentyl]amino]propyl]amino] -3-oxopropoxy]methyl]-1,12,19,25-tetraoxo-16-oxa-13,20,24-t riazanonacos-1-yl]-4-hydroxy-2-pyrrolidinyl)methyl ester
ttttagaacacctttttcact

SEQ ID NO: 1629 - RNA, 21 nt, synthetic construct
  source 1..21: mol_type = other RNA
  modified_base 1: mod_base = OTHER; note = 2'-O-methylguanosine-3'-phosphorothioate
  modified_base 2: mod_base = OTHER; note = 2'-O-methylguanosine-3'-phosphorothioate
  modified_base 3: mod_base = OTHER; note = 2'-O-methylcytidine-3'-phosphate
  modified_base 4: mod_base = OTHER; note = 2'-O-methylcytidine-3'-phosphate
  modified_base 5: mod_base = OTHER; note = 2'-O-methyluridine-3'-phosphate
  modified_base 6: mod_base = OTHER; note = 2'-O-methyluridine-3'-phosphate
  modified_base 7: mod_base = OTHER; note = 2'-deoxy-2'-fluoroadenosine-3'-phosphate
  modified_base 8: mod_base = OTHER; note = 2'-O-methyluridine-3'-phosphate
  modified_base 9: mod_base = OTHER; note = 2'-deoxy-2'-fluorocytidine-3'-phosphate
  modified_base 10: mod_base = OTHER; note = 2'-deoxy-2'-fluorocytidine-3'-phosphate
  modified_base 11: mod_base = OTHER; note = 2'-deoxy-2'-fluorocytidine-3'-phosphate
  modified_base 12: mod_base = OTHER; note = 2'-O-methyluridine-3'-phosphate
  modified_base 13: mod_base = OTHER; note = 2'-O-methylcytidine-3'-phosphate
  modified_base 14: mod_base = OTHER; note = 2'-O-methylcytidine-3'-phosphate
  modified_base 15: mod_base = OTHER; note = 2'-O-methyluridine-3'-phosphate
  modified_base 16: mod_base = OTHER; note = 2'-O-methyluridine-3'-phosphate
  modified_base 17: mod_base = OTHER; note = 2'-O-methylcytidine-3'-phosphate
  modified_base 18: mod_base = OTHER; note = 2'-O-methylcytidine-3'-phosphate
  modified_base 19: mod_base = OTHER; note = 2'-O-methyluridine-3'-phosphate
  modified_base 20: mod_base = OTHER; note = 2'-O-methyluridine-3'-phosphate
  modified_base 21: mod_base = OTHER; note = 2'-O-methyladenosine-3'-phosphate ((2S,4R)-1-[29-[[2-(acetylamino)-2-deoxy-beta-D-galactopyra nosyl]oxy]-14,14-bis[[3-[[3-[[5-[[2-(acetylamino)-2-deoxy-b eta-D-galactopyranosyl]oxy]-1-oxopentyl]amino]propyl]amino] -3-oxopropoxy]methyl]-1,12,19,25-tetraoxo-16-oxa-13,20,24-t riazanonacos-1-yl]-4-hydroxy-2-pyrrolidinyl)methyl ester
ggccttatccctccttcctta

SEQ ID NO: 1630 - RNA, 21 nt, synthetic construct
  source 1..21: mol_type = other RNA
  modified_base 1: mod_base = OTHER; note = 2'-O-methyladenosine-3'-phosphorothioate
  modified_base 2: mod_base = OTHER; note = 2'-O-methyluridine-3'-phosphorothioate
  modified_base 3: mod_base = OTHER; note = 2'-O-methyladenosine-3'-phosphate
  modified_base 4: mod_base = OTHER; note = 2'-O-methylcytidine-3'-phosphate
  modified_base 5: mod_base = OTHER; note = 2'-O-methyladenosine-3'-phosphate
  modified_base 6: mod_base = OTHER; note = 2'-O-methyluridine-3'-phosphate
  modified_base 7: mod_base = OTHER; note = 2'-deoxy-2'-fluoroguanosine-3'-phosphate
  modified_base 8: mod_base = OTHER; note = 2'-O-methyladenosine-3'-phosphate
  modified_base 9: mod_base = OTHER; note = 2'-deoxy-2'-fluoroguanosine-3'-phosphate
  modified_base 10: mod_base = OTHER; note = 2'-deoxy-2'-fluorocytidine-3'-phosphate
  modified_base 11: mod_base = OTHER; note = 2'-deoxy-2'-fluoroadenosine-3'-phosphate
  modified_base 12: mod_base = OTHER; note = 2'-O-methyladenosine-3'-phosphate
  modified_base 13: mod_base = OTHER; note = 2'-O-methylguanosine-3'-phosphate
  modified_base 14: mod_base = OTHER; note = 2'-O-methyladenosine-3'-phosphate
  modified_base 15: mod_base = OTHER; note = 2'-O-methyluridine-3'-phosphate
  modified_base 16: mod_base = OTHER; note = 2'-O-methyluridine-3'-phosphate
  modified_base 17: mod_base = OTHER; note = 2'-O-methyluridine-3'-phosphate
  modified_base 18: mod_base = OTHER; note = 2'-O-methylguanosine-3'-phosphate
  modified_base 19: mod_base = OTHER; note = 2'-O-methylcytidine-3'-phosphate
  modified_base 20: mod_base = OTHER; note = 2'-O-methyladenosine-3'-phosphate
  modified_base 21: mod_base = OTHER; note = 2'-O-methyladenosine-3'-phosphate ((2S,4R)-1-[29-[[2-(acetylamino)-2-deoxy-beta-D-galactopyra nosyl]oxy]-14,14-bis[[3-[[3-[[5-[[2-(acetylamino)-2-deoxy-b eta-D-galactopyranosyl]oxy]-1-oxopentyl]amino]propyl]amino] -3-oxopropoxy]methyl]-1,12,19,25-tetraoxo-16-oxa-13,20,24-t riazanonacos-1-yl]-4-hydroxy-2-pyrrolidinyl)methyl ester
atacatgagcaagatttgcaa

SEQ ID NO: 1631 - RNA, 21 nt, synthetic construct
  source 1..21: mol_type = other RNA
  modified_base 1: mod_base = OTHER; note = 2'-O-methylcytidine-3'-phosphorothioate
  modified_base 2: mod_base = OTHER; note = 2'-O-methyluridine-3'-phosphorothioate
  modified_base 3: mod_base = OTHER; note = 2'-O-methyladenosine-3'-phosphate
  modified_base 4: mod_base = OTHER; note = 2'-O-methyluridine-3'-phosphate
  modified_base 5: mod_base = OTHER; note = 2'-O-methyluridine-3'-phosphate
  modified_base 6: mod_base = OTHER; note = 2'-O-methyladenosine-3'-phosphate
  modified_base 7: mod_base = OTHER; note = 2'-deoxy-2'-fluoroadenosine-3'-phosphate
  modified_base 8: mod_base = OTHER; note = 2'-O-methyluridine-3'-phosphate
  modified_base 9: mod_base = OTHER; note = 2'-deoxy-2'-fluoroguanosine-3'-phosphate
  modified_base 10: mod_base = OTHER; note = 2'-deoxy-2'-fluoroguanosine-3'-phosphate
  modified_base 11: mod_base = OTHER; note = 2'-deoxy-2'-fluorouridine-3'-phosphate
  modified_base 12: mod_base = OTHER; note = 2'-O-methylcytidine-3'-phosphate
  modified_base 13: mod_base = OTHER; note = 2'-O-methyladenosine-3'-phosphate
  modified_base 14: mod_base = OTHER; note = 2'-O-methylguanosine-3'-phosphate
  modified_base 15: mod_base = OTHER; note = 2'-O-methyladenosine-3'-phosphate
  modified_base 16: mod_base = OTHER; note = 2'-O-methylcytidine-3'-phosphate
  modified_base 17: mod_base = OTHER; note = 2'-O-methyluridine-3'-phosphate
  modified_base 18: mod_base = OTHER; note = 2'-O-methylguanosine-3'-phosphate
  modified_base 19: mod_base = OTHER; note = 2'-O-methyluridine-3'-phosphate
  modified_base 20: mod_base = OTHER; note = 2'-O-methyluridine-3'-phosphate
  modified_base 21: mod_base = OTHER; note = 2'-O-methyladenosine-3'-phosphate ((2S,4R)-1-[29-[[2-(acetylamino)-2-deoxy-beta-D-galactopyra nosyl]oxy]-14,14-bis[[3-[[3-[[5-[[2-(acetylamino)-2-deoxy-b eta-D-galactopyranosyl]oxy]-1-oxopentyl]amino]propyl]amino] -3-oxopropoxy]methyl]-1,12,19,25-tetraoxo-16-oxa-13,20,24-t riazanonacos-1-yl]-4-hydroxy-2-pyrrolidinyl)methyl ester
ctattaatggtcagactgtta

SEQ ID NO: 1632 - RNA, 21 nt, synthetic construct
  source 1..21: mol_type = other RNA
  modified_base 1: mod_base = OTHER; note = 2'-O-methyluridine-3'-phosphorothioate
  modified_base 2: mod_base = OTHER; note = 2'-O-methylguanosine-3'-phosphorothioate
  modified_base 3: mod_base = OTHER; note = 2'-O-methylguanosine-3'-phosphate
  modified_base 4: mod_base = OTHER; note = 2'-O-methyladenosine-3'-phosphate
  modified_base 5: mod_base = OTHER; note = 2'-O-methyluridine-3'-phosphate
  modified_base 6: mod_base = OTHER; note = 2'-O-methyladenosine-3'-phosphate
  modified_base 7: mod_base = OTHER; note = 2'-deoxy-2'-fluorocytidine-3'-phosphate
  modified_base 8: mod_base = OTHER; note = 2'-O-methyladenosine-3'-phosphate
  modified_base 9: mod_base = OTHER; note = 2'-deoxy-2'-fluorouridine-3'-phosphate
  modified_base 10: mod_base = OTHER; note = 2'-deoxy-2'-fluoroguanosine-3'-phosphate
  modified_base 11: mod_base = OTHER; note = 2'-deoxy-2'-fluoroadenosine-3'-phosphate
  modified_base 12: mod_base = OTHER; note = 2'-O-methylguanosine-3'-phosphate
  modified_base 13: mod_base = OTHER; note = 2'-O-methylcytidine-3'-phosphate
  modified_base 14: mod_base = OTHER; note = 2'-O-methyladenosine-3'-phosphate
  modified_base 15: mod_base = OTHER; note = 2'-O-methyladenosine-3'-phosphate
  modified_base 16: mod_base = OTHER; note = 2'-O-methylguanosine-3'-phosphate
  modified_base 17: mod_base = OTHER; note = 2'-O-methyladenosine-3'-phosphate
  modified_base 18: mod_base = OTHER; note = 2'-O-methyluridine-3'-phosphate
  modified_base 19: mod_base = OTHER; note = 2'-O-methyluridine-3'-phosphate
  modified_base 20: mod_base = OTHER; note = 2'-O-methyluridine-3'-phosphate
  modified_base 21: mod_base = OTHER; note = 2'-O-methyladenosine-3'-phosphate ((2S,4R)-1-[29-[[2-(acetylamino)-2-deoxy-beta-D-galactopyra nosyl]oxy]-14,14-bis[[3-[[3-[[5-[[2-(acetylamino)-2-deoxy-b eta-D-galactopyranosyl]oxy]-1-oxopentyl]amino]propyl]amino] -3-oxopropoxy]methyl]-1,12,19,25-tetraoxo-16-oxa-13,20,24-t riazanonacos-1-yl]-4-hydroxy-2-pyrrolidinyl)methyl ester
tggatacatgagcaagattta

SEQ ID NO: 1633 - RNA, 21 nt, synthetic construct
  source 1..21: mol_type = other RNA
  modified_base 1: mod_base = OTHER; note = 2'-O-methyluridine-3'-phosphorothioate
  modified_base 2: mod_base = OTHER; note = 2'-O-methylcytidine-3'-phosphorothioate
  modified_base 3: mod_base = OTHER; note = 2'-O-methyladenosine-3'-phosphate
  modified_base 4: mod_base = OTHER; note = 2'-O-methylcytidine-3'-phosphate
  modified_base 5: mod_base = OTHER; note = 2'-O-methyluridine-3'-phosphate
  modified_base 6: mod_base = OTHER; note = 2'-O-methyluridine-3'-phosphate
  modified_base 7: mod_base = OTHER; note = 2'-deoxy-2'-fluoroguanosine-3'-phosphate
  modified_base 8: mod_base = OTHER; note = 2'-O-methyladenosine-3'-phosphate
  modified_base 9: mod_base = OTHER; note = 2'-deoxy-2'-fluoroguanosine-3'-phosphate
  modified_base 10: mod_base = OTHER; note = 2'-deoxy-2'-fluoroguanosine-3'-phosphate
  modified_base 11: mod_base = OTHER; note = 2'-deoxy-2'-fluoroadenosine-3'-phosphate
  modified_base 12: mod_base = OTHER; note = 2'-O-methylguanosine-3'-phosphate
  modified_base 13: mod_base = OTHER; note = 2'-O-methylguanosine-3'-phosphate
  modified_base 14: mod_base = OTHER; note = 2'-O-methylcytidine-3'-phosphate
  modified_base 15: mod_base = OTHER; note = 2'-O-methylguanosine-3'-phosphate
  modified_base 16: mod_base = OTHER; note = 2'-O-methyladenosine-3'-phosphate
  modified_base 17: mod_base = OTHER; note = 2'-O-methylguanosine-3'-phosphate
  modified_base 18: mod_base = OTHER; note = 2'-O-methyluridine-3'-phosphate
  modified_base 19: mod_base = OTHER; note = 2'-O-methylcytidine-3'-phosphate
  modified_base 20: mod_base = OTHER; note = 2'-O-methyluridine-3'-phosphate
  modified_base 21: mod_base = OTHER; note = 2'-O-methyladenosine-3'-phosphate ((2S,4R)-1-[29-[[2-(acetylamino)-2-deoxy-beta-D-galactopyra nosyl]oxy]-14,14-bis[[3-[[3-[[5-[[2-(acetylamino)-2-deoxy-b eta-D-galactopyranosyl]oxy]-1-oxopentyl]amino]propyl]amino] -3-oxopropoxy]methyl]-1,12,19,25-tetraoxo-16-oxa-13,20,24-t riazanonacos-1-yl]-4-hydroxy-2-pyrrolidinyl)methyl ester
tcacttgaggaggcgagtcta

SEQ ID NO: 1634 - RNA, 21 nt, synthetic construct
  source 1..21: mol_type = other RNA
  modified_base 1: mod_base = OTHER; note = 2'-O-methyladenosine-3'-phosphorothioate
  modified_base 2: mod_base = OTHER; note = 2'-O-methyluridine-3'-phosphorothioate
  modified_base 3: mod_base = OTHER; note = 2'-O-methylguanosine-3'-phosphate
  modified_base 4: mod_base = OTHER; note = 2'-O-methyluridine-3'-phosphate
  modified_base 5: mod_base = OTHER; note = 2'-O-methyluridine-3'-phosphate
  modified_base 6: mod_base = OTHER; note = 2'-O-methyladenosine-3'-phosphate
  modified_base 7: mod_base = OTHER; note = 2'-deoxy-2'-fluoroguanosine-3'-phosphate
  modified_base 8: mod_base = OTHER; note = 2'-O-methyluridine-3'-phosphate
  modified_base 9: mod_base = OTHER; note = 2'-deoxy-2'-fluoroadenosine-3'-phosphate
  modified_base 10: mod_base = OTHER; note = 2'-deoxy-2'-fluoroguanosine-3'-phosphate
  modified_base 11: mod_base = OTHER; note = 2'-deoxy-2'-fluoroadenosine-3'-phosphate
  modified_base 12: mod_base = OTHER; note = 2'-O-methyladenosine-3'-phosphate
  modified_base 13: mod_base = OTHER; note = 2'-O-methyluridine-3'-phosphate
  modified_base 14: mod_base = OTHER; note = 2'-O-methyladenosine-3'-phosphate
  modified_base 15: mod_base = OTHER; note = 2'-O-methyladenosine-3'-phosphate
  modified_base 16: mod_base = OTHER; note = 2'-O-methylguanosine-3'-phosphate
  modified_base 17: mod_base = OTHER; note = 2'-O-methylcytidine-3'-phosphate
  modified_base 18: mod_base = OTHER; note = 2'-O-methylcytidine-3'-phosphate
  modified_base 19: mod_base = OTHER; note = 2'-O-methyluridine-3'-phosphate
  modified_base 20: mod_base = OTHER; note = 2'-O-methyluridine-3'-phosphate
  modified_base 21: mod_base = OTHER; note = 2'-O-methyladenosine-3'-phosphate ((2S,4R)-1-[29-[[2-(acetylamino)-2-deoxy-beta-D-galactopyra nosyl]oxy]-14,14-bis[[3-[[3-[[5-[[2-(acetylamino)-2-deoxy-b eta-D-galactopyranosyl]oxy]-1-oxopentyl]amino]propyl]amino] -3-oxopropoxy]methyl]-1,12,19,25-tetraoxo-16-oxa-13,20,24-t riazanonacos-1-yl]-4-hydroxy-2-pyrrolidinyl)methyl ester
atgttagtagaataagcctta

SEQ ID NO: 1635 - RNA, 21 nt, synthetic construct
  source 1..21: mol_type = other RNA
  modified_base 1: mod_base = OTHER; note = 2'-O-methyluridine-3'-phosphorothioate
  modified_base 2: mod_base = OTHER; note = 2'-O-methyluridine-3'-phosphorothioate
  modified_base 3: mod_base = OTHER; note = 2'-O-methylguanosine-3'-phosphate
  modified_base 4: mod_base = OTHER; note = 2'-O-methylguanosine-3'-phosphate
  modified_base 5: mod_base = OTHER; note = 2'-O-methyluridine-3'-phosphate
  modified_base 6: mod_base = OTHER; note = 2'-O-methyluridine-3'-phosphate
  modified_base 7: mod_base = OTHER; note = 2'-deoxy-2'-fluorouridine-3'-phosphate
  modified_base 8: mod_base = OTHER; note = 2'-O-methyluridine-3'-phosphate
  modified_base 9: mod_base = OTHER; note = 2'-deoxy-2'-fluoroadenosine-3'-phosphate
  modified_base 10: mod_base = OTHER; note = 2'-deoxy-2'-fluorouridine-3'-phosphate
  modified_base 11: mod_base = OTHER; note = 2'-deoxy-2'-fluoroguanosine-3'-phosphate
  modified_base 12: mod_base = OTHER; note = 2'-O-methyladenosine-3'-phosphate
  modified_base 13: mod_base = OTHER; note = 2'-O-methyladenosine-3'-phosphate
  modified_base 14: mod_base = OTHER; note = 2'-O-methyladenosine-3'-phosphate
  modified_base 15: mod_base = OTHER; note = 2'-O-methyladenosine-3'-phosphate
  modified_base 16: mod_base = OTHER; note = 2'-O-methylguanosine-3'-phosphate
  modified_base 17: mod_base = OTHER; note = 2'-O-methylcytidine-3'-phosphate
  modified_base 18: mod_base = OTHER; note = 2'-O-methyluridine-3'-phosphate
  modified_base 19: mod_base = OTHER; note = 2'-O-methyladenosine-3'-phosphate
  modified_base 20: mod_base = OTHER; note = 2'-O-methylguanosine-3'-phosphate
  modified_base 21: mod_base = OTHER; note = 2'-O-methyladenosine-3'-phosphate ((2S,4R)-1-[29-[[2-(acetylamino)-2-deoxy-beta-D-galactopyra nosyl]oxy]-14,14-bis[[3-[[3-[[5-[[2-(acetylamino)-2-deoxy-b eta-D-galactopyranosyl]oxy]-1-oxopentyl]amino]propyl]amino] -3-oxopropoxy]methyl]-1,12,19,25-tetraoxo-16-oxa-13,20,24-t riazanonacos-1-yl]-4-hydroxy-2-pyrrolidinyl)methyl ester
ttggttttatgaaaagctaga

SEQ ID NO: 1636 - RNA, 21 nt, synthetic construct
  source 1..21: mol_type = other RNA
  modified_base 1: mod_base = OTHER; note = 2'-O-methylguanosine-3'-phosphorothioate
  modified_base 2: mod_base = OTHER; note = 2'-O-methylcytidine-3'-phosphorothioate
  modified_base 3: mod_base = OTHER; note = 2'-O-methyladenosine-3'-phosphate
  modified_base 4: mod_base = OTHER; note = 2'-O-methylcytidine-3'-phosphate
  modified_base 5: mod_base = OTHER; note = 2'-O-methyladenosine-3'-phosphate
  modified_base 6: mod_base = OTHER; note = 2'-O-methylguanosine-3'-phosphate
  modified_base 7: mod_base = OTHER; note = 2'-deoxy-2'-fluoroguanosine-3'-phosphate
  modified_base 8: mod_base = OTHER; note = 2'-O-methylguanosine-3'-phosphate
  modified_base 9: mod_base = OTHER; note = 2'-deoxy-2'-fluoroadenosine-3'-phosphate
  modified_base 10: mod_base = OTHER; note = 2'-deoxy-2'-fluoroadenosine-3'-phosphate
  modified_base 11: mod_base = OTHER; note = 2'-deoxy-2'-fluorocytidine-3'-phosphate
  modified_base 12: mod_base = OTHER; note = 2'-O-methylcytidine-3'-phosphate
  modified_base 13: mod_base = OTHER; note = 2'-O-methyluridine-3'-phosphate
  modified_base 14: mod_base = OTHER; note = 2'-O-methylcytidine-3'-phosphate
  modified_base 15: mod_base = OTHER; note = 2'-O-methyluridine-3'-phosphate
  modified_base 16: mod_base = OTHER; note = 2'-O-methyladenosine-3'-phosphate
  modified_base 17: mod_base = OTHER; note = 2'-O-methylcytidine-3'-phosphate
  modified_base 18: mod_base = OTHER; note = 2'-O-methylcytidine-3'-phosphate
  modified_base 19: mod_base = OTHER; note = 2'-O-methyluridine-3'-phosphate
  modified_base 20: mod_base = OTHER; note = 2'-O-methyluridine-3'-phosphate
  modified_base 21: mod_base = OTHER; note = 2'-O-methyladenosine-3'-phosphate ((2S,4R)-1-[29-[[2-(acetylamino)-2-deoxy-beta-D-galactopyra nosyl]oxy]-14,14-bis[[3-[[3-[[5-[[2-(acetylamino)-2-deoxy-b eta-D-galactopyranosyl]oxy]-1-oxopentyl]amino]propyl]amino] -3-oxopropoxy]methyl]-1,12,19,25-tetraoxo-16-oxa-13,20,24-t riazanonacos-1-yl]-4-hydroxy-2-pyrrolidinyl)methyl ester
gcacagggaacctctacctta

SEQ ID NO: 1637 - RNA, 21 nt, synthetic construct
  source 1..21: mol_type = other RNA
  modified_base 1: mod_base = OTHER; note = 2'-O-methyluridine-3'-phosphorothioate
  modified_base 2: mod_base = OTHER; note = 2'-O-methylguanosine-3'-phosphorothioate
  modified_base 3: mod_base = OTHER; note = 2'-O-methylguanosine-3'-phosphate
  modified_base 4: mod_base = OTHER; note = 2'-O-methyluridine-3'-phosphate
  modified_base 5: mod_base = OTHER; note = 2'-O-methylguanosine-3'-phosphate
  modified_base 6: mod_base = OTHER; note = 2'-O-methyladenosine-3'-phosphate
  modified_base 7: mod_base = OTHER; note = 2'-deoxy-2'-fluorocytidine-3'-phosphate
  modified_base 8: mod_base = OTHER; note = 2'-O-methyladenosine-3'-phosphate
  modified_base 9: mod_base = OTHER; note = 2'-deoxy-2'-fluorouridine-3'-phosphate
  modified_base 10: mod_base = OTHER; note = 2'-deoxy-2'-fluoroguanosine-3'-phosphate
  modified_base 11: mod_base = OTHER; note = 2'-deoxy-2'-fluoroguanosine-3'-phosphate
  modified_base 12: mod_base = OTHER; note = 2'-O-methylcytidine-3'-phosphate
  modified_base 13: mod_base = OTHER; note = 2'-O-methyluridine-3'-phosphate
  modified_base 14: mod_base = OTHER; note = 2'-O-methyluridine-3'-phosphate
  modified_base 15: mod_base = OTHER; note = 2'-O-methylcytidine-3'-phosphate
  modified_base 16: mod_base = OTHER; note = 2'-O-methylcytidine-3'-phosphate
  modified_base 17: mod_base = OTHER; note = 2'-O-methyladenosine-3'-phosphate
  modified_base 18: mod_base = OTHER; note = 2'-O-methylguanosine-3'-phosphate
  modified_base 19: mod_base = OTHER; note = 2'-O-methyladenosine-3'-phosphate
  modified_base 20: mod_base = OTHER; note = 2'-O-methyluridine-3'-phosphate
  modified_base 21: mod_base = OTHER; note = 2'-O-methyladenosine-3'-phosphate ((2S,4R)-1-[29-[[2-(acetylamino)-2-deoxy-beta-D-galactopyra nosyl]oxy]-14,14-bis[[3-[[3-[[5-[[2-(acetylamino)-2-deoxy-b eta-D-galactopyranosyl]oxy]-1-oxopentyl]amino]propyl]amino] -3-oxopropoxy]methyl]-1,12,19,25-tetraoxo-16-oxa-13,20,24-t riazanonacos-1-yl]-4-hydroxy-2-pyrrolidinyl)methyl ester
tggtgacatggcttccagata

SEQ ID NO: 1638 - RNA, 21 nt, synthetic construct
  source 1..21: mol_type = other RNA
  modified_base 1: mod_base = OTHER; note = 2'-O-methyluridine-3'-phosphorothioate
  modified_base 2: mod_base = OTHER; note = 2'-O-methyluridine-3'-phosphorothioate
  modified_base 3: mod_base = OTHER; note = 2'-O-methyladenosine-3'-phosphate
  modified_base 4: mod_base = OTHER; note = 2'-O-methylcytidine-3'-phosphate
  modified_base 5: mod_base = OTHER; note = 2'-O-methylcytidine-3'-phosphate
  modified_base 6: mod_base = OTHER; note = 2'-O-methyluridine-3'-phosphate
  modified_base 7: mod_base = OTHER; note = 2'-deoxy-2'-fluoroguanosine-3'-phosphate
  modified_base 8: mod_base = OTHER; note = 2'-O-methyluridine-3'-phosphate
  modified_base 9: mod_base = OTHER; note = 2'-deoxy-2'-fluorouridine-3'-phosphate
  modified_base 10: mod_base = OTHER; note = 2'-deoxy-2'-fluoroguanosine-3'-phosphate
  modified_base 11: mod_base = OTHER; note = 2'-deoxy-2'-fluoroadenosine-3'-phosphate
  modified_base 12: mod_base = OTHER; note = 2'-O-methyladenosine-3'-phosphate
  modified_base 13: mod_base = OTHER; note = 2'-O-methyluridine-3'-phosphate
  modified_base 14: mod_base = OTHER; note = 2'-O-methyluridine-3'-phosphate
  modified_base 15: mod_base = OTHER; note = 2'-O-methyluridine-3'-phosphate
  modified_base 16: mod_base = OTHER; note = 2'-O-methyluridine-3'-phosphate
  modified_base 17: mod_base = OTHER; note = 2'-O-methylguanosine-3'-phosphate
  modified_base 18: mod_base = OTHER; note = 2'-O-methyluridine-3'-phosphate
  modified_base 19: mod_base = OTHER; note = 2'-O-methyladenosine-3'-phosphate
  modified_base 20: mod_base = OTHER; note = 2'-O-methyluridine-3'-phosphate
  modified_base 21: mod_base = OTHER; note = 2'-O-methyluridine-3'-phosphate ((2S,4R)-1-[29-[[2-(acetylamino)-2-deoxy-beta-D-galactopyra nosyl]oxy]-14,14-bis[[3-[[3-[[5-[[2-(acetylamino)-2-deoxy-b eta-D-galactopyranosyl]oxy]-1-oxopentyl]amino]propyl]amino] -3-oxopropoxy]methyl]-1,12,19,25-tetraoxo-16-oxa-13,20,24-t riazanonacos-1-yl]-4-hydroxy-2-pyrrolidinyl)methyl ester
ttacctgttgaattttgtatt

SEQ ID NO: 1639 - RNA, 21 nt, synthetic construct
  source 1..21: mol_type = other RNA
  modified_base 1: mod_base = OTHER; note = 2'-O-methylcytidine-3'-phosphorothioate
  modified_base 2: mod_base = OTHER; note = 2'-O-methylguanosine-3'-phosphorothioate
  modified_base 3: mod_base = OTHER; note = 2'-O-methyladenosine-3'-phosphate
  modified_base 4: mod_base = OTHER; note = 2'-O-methylcytidine-3'-phosphate
  modified_base 5: mod_base = OTHER; note = 2'-O-methyladenosine-3'-phosphate
  modified_base 6: mod_base = OTHER; note = 2'-O-methyluridine-3'-phosphate
  modified_base 7: mod_base = OTHER; note = 2'-deoxy-2'-fluorocytidine-3'-phosphate
  modified_base 8: mod_base = OTHER; note = 2'-O-methyluridine-3'-phosphate
  modified_base 9: mod_base = OTHER; note = 2'-deoxy-2'-fluoroguanosine-3'-phosphate
  modified_base 10: mod_base = OTHER; note = 2'-deoxy-2'-fluorocytidine-3'-phosphate
  modified_base 11: mod_base = OTHER; note = 2'-deoxy-2'-fluorocytidine-3'-phosphate
  modified_base 12: mod_base = OTHER; note = 2'-O-methylcytidine-3'-phosphate
  modified_base 13: mod_base = OTHER; note = 2'-O-methyluridine-3'-phosphate
  modified_base 14: mod_base = OTHER; note = 2'-O-methyladenosine-3'-phosphate
  modified_base 15: mod_base = OTHER; note = 2'-O-methyladenosine-3'-phosphate
  modified_base 16: mod_base = OTHER; note = 2'-O-methyladenosine-3'-phosphate
  modified_base 17: mod_base = OTHER; note = 2'-O-methylguanosine-3'-phosphate
  modified_base 18: mod_base = OTHER; note = 2'-O-methyluridine-3'-phosphate
  modified_base 19: mod_base = OTHER; note = 2'-O-methylcytidine-3'-phosphate
  modified_base 20: mod_base = OTHER; note = 2'-O-methyladenosine-3'-phosphate
  modified_base 21: mod_base = OTHER; note = 2'-O-methyladenosine-3'-phosphate ((2S,4R)-1-[29-[[2-(acetylamino)-2-deoxy-beta-D-galactopyra nosyl]oxy]-14,14-bis[[3-[[3-[[5-[[2-(acetylamino)-2-deoxy-b eta-D-galactopyranosyl]oxy]-1-oxopentyl]amino]propyl]amino] -3-oxopropoxy]methyl]-1,12,19,25-tetraoxo-16-oxa-13,20,24-t riazanonacos-1-yl]-4-hydroxy-2-pyrrolidinyl)methyl ester
cgacatctgccctaaagtcaa

SEQ ID NO: 1640 - RNA, 21 nt, synthetic construct
  source 1..21: mol_type = other RNA
  modified_base 1: mod_base = OTHER; note = 2'-O-methylguanosine-3'-phosphorothioate
  modified_base 2: mod_base = OTHER; note = 2'-O-methyluridine-3'-phosphorothioate
  modified_base 3: mod_base = OTHER; note = 2'-O-methylguanosine-3'-phosphate
  modified_base 4: mod_base = OTHER; note = 2'-O-methyladenosine-3'-phosphate
  modified_base 5: mod_base = OTHER; note = 2'-O-methylguanosine-3'-phosphate
  modified_base 6: mod_base = OTHER; note = 2'-O-methyluridine-3'-phosphate
  modified_base 7: mod_base = OTHER; note = 2'-deoxy-2'-fluoroguanosine-3'-phosphate
  modified_base 8: mod_base = OTHER; note = 2'-O-methyladenosine-3'-phosphate
  modified_base 9: mod_base = OTHER; note = 2'-deoxy-2'-fluorocytidine-3'-phosphate
  modified_base 10: mod_base = OTHER; note = 2'-deoxy-2'-fluoroadenosine-3'-phosphate
  modified_base 11: mod_base = OTHER; note = 2'-deoxy-2'-fluoroadenosine-3'-phosphate
  modified_base 12: mod_base = OTHER; note = 2'-O-methylcytidine-3'-phosphate
  modified_base 13: mod_base = OTHER; note = 2'-O-methylguanosine-3'-phosphate
  modified_base 14: mod_base = OTHER; note = 2'-O-methyluridine-3'-phosphate
  modified_base 15: mod_base = OTHER; note = 2'-O-methyladenosine-3'-phosphate
  modified_base 16: mod_base = OTHER; note = 2'-O-methylcytidine-3'-phosphate
  modified_base 17: mod_base = OTHER; note = 2'-O-methylcytidine-3'-phosphate
  modified_base 18: mod_base = OTHER; note = 2'-O-methylcytidine-3'-phosphate
  modified_base 19: mod_base = OTHER; note = 2'-O-methyluridine-3'-phosphate
  modified_base 20: mod_base = OTHER; note = 2'-O-methyluridine-3'-phosphate
  modified_base 21: mod_base = OTHER; note = 2'-O-methyladenosine-3'-phosphate ((2S,4R)-1-[29-[[2-(acetylamino)-2-deoxy-beta-D-galactopyra nosyl]oxy]-14,14-bis[[3-[[3-[[5-[[2-(acetylamino)-2-deoxy-b eta-D-galactopyranosyl]oxy]-1-oxopentyl]amino]propyl]amino] -3-oxopropoxy]methyl]-1,12,19,25-tetraoxo-16-oxa-13,20,24-t riazanonacos-1-yl]-4-hydroxy-2-pyrrolidinyl)methyl ester
gtgagtgacaacgtaccctta

SEQ ID NO: 1641 - RNA, 21 nt, synthetic construct
  source 1..21: mol_type = other RNA
  modified_base 1: mod_base = OTHER; note = 2'-O-methylguanosine-3'-phosphorothioate
  modified_base 2: mod_base = OTHER; note = 2'-O-methyluridine-3'-phosphorothioate
  modified_base 3: mod_base = OTHER; note = 2'-O-methylguanosine-3'-phosphate
  modified_base 4: mod_base = OTHER; note = 2'-O-methylcytidine-3'-phosphate
  modified_base 5: mod_base = OTHER; note = 2'-O-methyluridine-3'-phosphate
  modified_base 6: mod_base = OTHER; note = 2'-O-methyladenosine-3'-phosphate
  modified_base 7: mod_base = OTHER; note = 2'-deoxy-2'-fluoroadenosine-3'-phosphate
  modified_base 8: mod_base = OTHER; note = 2'-O-methyladenosine-3'-phosphate
  modified_base 9: mod_base = OTHER; note = 2'-deoxy-2'-fluoroguanosine-3'-phosphate
  modified_base 10: mod_base = OTHER; note = 2'-deoxy-2'-fluorouridine-3'-phosphate
  modified_base 11: mod_base = OTHER; note = 2'-deoxy-2'-fluorouridine-3'-phosphate
  modified_base 12: mod_base = OTHER; note = 2'-O-methyluridine-3'-phosphate
  modified_base 13: mod_base = OTHER; note = 2'-O-methylcytidine-3'-phosphate
  modified_base 14: mod_base = OTHER; note = 2'-O-methylcytidine-3'-phosphate
  modified_base 15: mod_base = OTHER; note = 2'-O-methylcytidine-3'-phosphate
  modified_base 16: mod_base = OTHER; note = 2'-O-methyladenosine-3'-phosphate
  modified_base 17: mod_base = OTHER; note = 2'-O-methyluridine-3'-phosphate
  modified_base 18: mod_base = OTHER; note = 2'-O-methylcytidine-3'-phosphate
  modified_base 19: mod_base = OTHER; note = 2'-O-methyluridine-3'-phosphate
  modified_base 20: mod_base = OTHER; note = 2'-O-methyluridine-3'-phosphate
  modified_base 21: mod_base = OTHER; note = 2'-O-methyluridine-3'-phosphate ((2S,4R)-1-[29-[[2-(acetylamino)-2-deoxy-beta-D-galactopyra nosyl]oxy]-14,14-bis[[3-[[3-[[5-[[2-(acetylamino)-2-deoxy-b eta-D-galactopyranosyl]oxy]-1-oxopentyl]amino]propyl]amino] -3-oxopropoxy]methyl]-1,12,19,25-tetraoxo-16-oxa-13,20,24-t riazanonacos-1-yl]-4-hydroxy-2-pyrrolidinyl)methyl ester
gtgctaaagtttcccatcttt

SEQ ID NO: 1642 - RNA, 21 nt, synthetic construct
  source 1..21: mol_type = other RNA
  modified_base 1: mod_base = OTHER; note = 2'-O-methylcytidine-3'-phosphorothioate
  modified_base 2: mod_base = OTHER; note = 2'-O-methyladenosine-3'-phosphorothioate
  modified_base 3: mod_base = OTHER; note = 2'-O-methyladenosine-3'-phosphate
  modified_base 4: mod_base = OTHER; note = 2'-O-methylguanosine-3'-phosphate
  modified_base 5: mod_base = OTHER; note = 2'-O-methyladenosine-3'-phosphate
  modified_base 6: mod_base = OTHER; note = 2'-O-methyluridine-3'-phosphate
  modified_base 7: mod_base = OTHER; note = 2'-deoxy-2'-fluorouridine-3'-phosphate
  modified_base 8: mod_base = OTHER; note = 2'-O-methyluridine-3'-phosphate
  modified_base 9: mod_base = OTHER; note = 2'-deoxy-2'-fluoroguanosine-3'-phosphate
  modified_base 10: mod_base = OTHER; note = 2'-deoxy-2'-fluorocytidine-3'-phosphate
  modified_base 11: mod_base = OTHER; note = 2'-deoxy-2'-fluoroadenosine-3'-phosphate
  modified_base 12: mod_base = OTHER; note = 2'-O-methyladenosine-3'-phosphate
  modified_base 13: mod_base = OTHER; note = 2'-O-methylcytidine-3'-phosphate
  modified_base 14: mod_base = OTHER; note = 2'-O-methyluridine-3'-phosphate
  modified_base 15: mod_base = OTHER; note = 2'-O-methyluridine-3'-phosphate
  modified_base 16: mod_base = OTHER; note = 2'-O-methylguanosine-3'-phosphate
  modified_base 17: mod_base = OTHER; note = 2'-O-methylcytidine-3'-phosphate
  modified_base 18: mod_base = OTHER; note = 2'-O-methyluridine-3'-phosphate
  modified_base 19: mod_base = OTHER; note = 2'-O-methyladenosine-3'-phosphate
  modified_base 20: mod_base = OTHER; note = 2'-O-methylcytidine-3'-phosphate
  modified_base 21: mod_base = OTHER; note = 2'-O-methyladenosine-3'-phosphate ((2S,4R)-1-[29-[[2-(acetylamino)-2-deoxy-beta-D-galactopyra nosyl]oxy]-14,14-bis[[3-[[3-[[5-[[2-(acetylamino)-2-deoxy-b eta-D-galactopyranosyl]oxy]-1-oxopentyl]amino]propyl]amino] -3-oxopropoxy]methyl]-1,12,19,25-tetraoxo-16-oxa-13,20,24-t riazanonacos-1-yl]-4-hydroxy-2-pyrrolidinyl)methyl ester
caagatttgcaacttgctaca

SEQ ID NO: 1643 - RNA, 21 nt, synthetic construct
  source 1..21: mol_type = other RNA
  modified_base 1: mod_base = OTHER; note = 2'-O-methylcytidine-3'-phosphorothioate
  modified_base 2: mod_base = OTHER; note = 2'-O-methylcytidine-3'-phosphorothioate
  modified_base 3: mod_base = OTHER; note = 2'-O-methyluridine-3'-phosphate
  modified_base 4: mod_base = OTHER; note = 2'-O-methyladenosine-3'-phosphate
  modified_base 5: mod_base = OTHER; note = 2'-O-methyladenosine-3'-phosphate
  modified_base 6: mod_base = OTHER; note = 2'-O-methylcytidine-3'-phosphate
  modified_base 7: mod_base = OTHER; note = 2'-deoxy-2'-fluorouridine-3'-phosphate
  modified_base 8: mod_base = OTHER; note = 2'-O-methyladenosine-3'-phosphate
  modified_base 9: mod_base = OTHER; note = 2'-deoxy-2'-fluoroadenosine-3'-phosphate
  modified_base 10: mod_base = OTHER; note = 2'-deoxy-2'-fluoroadenosine-3'-phosphate
  modified_base 11: mod_base = OTHER; note = 2'-deoxy-2'-fluoroadenosine-3'-phosphate
  modified_base 12: mod_base = OTHER; note = 2'-O-methyluridine-3'-phosphate
  modified_base 13: mod_base = OTHER; note = 2'-O-methyladenosine-3'-phosphate
  modified_base 14: mod_base = OTHER; note = 2'-O-methyladenosine-3'-phosphate
  modified_base 15: mod_base = OTHER; note = 2'-O-methyluridine-3'-phosphate
  modified_base 16: mod_base = OTHER; note = 2'-O-methylguanosine-3'-phosphate
  modified_base 17: mod_base = OTHER; note = 2'-O-methyluridine-3'-phosphate
  modified_base 18: mod_base = OTHER; note = 2'-O-methyluridine-3'-phosphate
  modified_base 19: mod_base = OTHER; note = 2'-O-methyluridine-3'-phosphate
  modified_base 20: mod_base = OTHER; note = 2'-O-methyladenosine-3'-phosphate
  modified_base 21: mod_base = OTHER; note = 2'-O-methyladenosine-3'-phosphate ((2S,4R)-1-[29-[[2-(acetylamino)-2-deoxy-beta-D-galactopyra nosyl]oxy]-14,14-bis[[3-[[3-[[5-[[2-(acetylamino)-2-deoxy-b eta-D-galactopyranosyl]oxy]-1-oxopentyl]amino]propyl]amino] -3-oxopropoxy]methyl]-1,12,19,25-tetraoxo-16-oxa-13,20,24-t riazanonacos-1-yl]-4-hydroxy-2-pyrrolidinyl)methyl ester
cctaactaaaataatgtttaa

SEQ ID NO: 1644 - RNA, 21 nt, synthetic construct
  source 1..21: mol_type = other RNA
  modified_base 1: mod_base = OTHER; note = 2'-O-methyluridine-3'-phosphorothioate
  modified_base 2: mod_base = OTHER; note = 2'-O-methylguanosine-3'-phosphorothioate
  modified_base 3: mod_base = OTHER; note = 2'-O-methylguanosine-3'-phosphate
  modified_base 4: mod_base = OTHER; note = 2'-O-methylguanosine-3'-phosphate
  modified_base 5: mod_base = OTHER; note = 2'-O-methyladenosine-3'-phosphate
  modified_base 6: mod_base = OTHER; note = 2'-O-methylguanosine-3'-phosphate
  modified_base 7: mod_base = OTHER; note = 2'-deoxy-2'-fluoroadenosine-3'-phosphate
  modified_base 8: mod_base = OTHER; note = 2'-O-methylguanosine-3'-phosphate
  modified_base 9: mod_base = OTHER; note = 2'-deoxy-2'-fluoroadenosine-3'-phosphate
  modified_base 10: mod_base = OTHER; note = 2'-deoxy-2'-fluorouridine-3'-phosphate
  modified_base 11: mod_base = OTHER; note = 2'-deoxy-2'-fluoroadenosine-3'-phosphate
  modified_base 12: mod_base = OTHER; note = 2'-O-methyluridine-3'-phosphate
  modified_base 13: mod_base = OTHER; note = 2'-O-methylguanosine-3'-phosphate
  modified_base 14: mod_base = OTHER; note = 2'-O-methylcytidine-3'-phosphate
  modified_base 15: mod_base = OTHER; note = 2'-O-methylcytidine-3'-phosphate
  modified_base 16: mod_base = OTHER; note = 2'-O-methyluridine-3'-phosphate
  modified_base 17: mod_base = OTHER; note = 2'-O-methyluridine-3'-phosphate
  modified_base 18: mod_base = OTHER; note = 2'-O-methylcytidine-3'-phosphate
  modified_base 19: mod_base = OTHER; note = 2'-O-methylguanosine-3'-phosphate
  modified_base 20: mod_base = OTHER; note = 2'-O-methyladenosine-3'-phosphate
  modified_base 21: mod_base = OTHER; note = 2'-O-methyladenosine-3'-phosphate ((2S,4R)-1-[29-[[2-(acetylamino)-2-deoxy-beta-D-galactopyra nosyl]oxy]-14,14-bis[[3-[[3-[[5-[[2-(acetylamino)-2-deoxy-b eta-D-galactopyranosyl]oxy]-1-oxopentyl]amino]propyl]amino] -3-oxopropoxy]methyl]-1,12,19,25-tetraoxo-16-oxa-13,20,24-t riazanonacos-1-yl]-4-hydroxy-2-pyrrolidinyl)methyl ester
tgggagagatatgccttcgaa

SEQ ID NO: 1645 - RNA, 21 nt, synthetic construct
  source 1..21: mol_type = other RNA
  modified_base 1: mod_base = OTHER; note = 2'-O-methyladenosine-3'-phosphorothioate
  modified_base 2: mod_base = OTHER; note = 2'-O-methyladenosine-3'-phosphorothioate
  modified_base 3: mod_base = OTHER; note = 2'-O-methylcytidine-3'-phosphate
  modified_base 4: mod_base = OTHER; note = 2'-O-methyluridine-3'-phosphate
  modified_base 5: mod_base = OTHER; note = 2'-O-methyluridine-3'-phosphate
  modified_base 6: mod_base = OTHER; note = 2'-O-methylguanosine-3'-phosphate
  modified_base 7: mod_base = OTHER; note = 2'-deoxy-2'-fluorocytidine-3'-phosphate
  modified_base 8: mod_base = OTHER; note = 2'-O-methyluridine-3'-phosphate
  modified_base 9: mod_base = OTHER; note = 2'-deoxy-2'-fluoroadenosine-3'-phosphate
  modified_base 10: mod_base = OTHER; note = 2'-deoxy-2'-fluorocytidine-3'-phosphate
  modified_base 11: mod_base = OTHER; note = 2'-deoxy-2'-fluorocytidine-3'-phosphate
  modified_base 12: mod_base = OTHER; note = 2'-O-methylcytidine-3'-phosphate
  modified_base 13: mod_base = OTHER; note = 2'-O-methyladenosine-3'-phosphate
  modified_base 14: mod_base = OTHER; note = 2'-O-methyluridine-3'-phosphate
  modified_base 15: mod_base = OTHER; note = 2'-O-methyluridine-3'-phosphate
  modified_base 16: mod_base = OTHER; note = 2'-O-methyladenosine-3'-phosphate
  modified_base 17: mod_base = OTHER; note = 2'-O-methylguanosine-3'-phosphate
  modified_base 18: mod_base = OTHER; note = 2'-O-methylguanosine-3'-phosphate
  modified_base 19: mod_base = OTHER; note = 2'-O-methyladenosine-3'-phosphate
  modified_base 20: mod_base = OTHER; note = 2'-O-methyluridine-3'-phosphate
  modified_base 21: mod_base = OTHER; note = 2'-O-methyladenosine-3'-phosphate ((2S,4R)-1-[29-[[2-(acetylamino)-2-deoxy-beta-D-galactopyra nosyl]oxy]-14,14-bis[[3-[[3-[[5-[[2-(acetylamino)-2-deoxy-b eta-D-galactopyranosyl]oxy]-1-oxopentyl]amino]propyl]amino] -3-oxopropoxy]methyl]-1,12,19,25-tetraoxo-16-oxa-13,20,24-t riazanonacos-1-yl]-4-hydroxy-2-pyrrolidinyl)methyl ester
aacttgctacccattaggata

SEQ ID NO: 1646 - RNA, 21 nt, synthetic construct
  source 1..21: mol_type = other RNA
  modified_base 1: mod_base = OTHER; note = 2'-O-methyladenosine-3'-phosphorothioate
  modified_base 2: mod_base = OTHER; note = 2'-O-methyladenosine-3'-phosphorothioate
  modified_base 3: mod_base = OTHER; note = 2'-O-methyladenosine-3'-phosphate
  modified_base 4: mod_base = OTHER; note = 2'-O-methyluridine-3'-phosphate
  modified_base 5: mod_base = OTHER; note = 2'-O-methylguanosine-3'-phosphate
  modified_base 6: mod_base = OTHER; note = 2'-O-methyladenosine-3'-phosphate
  modified_base 7: mod_base = OTHER; note = 2'-deoxy-2'-fluoroadenosine-3'-phosphate
  modified_base 8: mod_base = OTHER; note = 2'-O-methyladenosine-3'-phosphate
  modified_base 9: mod_base = OTHER; note = 2'-deoxy-2'-fluoroguanosine-3'-phosphate
  modified_base 10: mod_base = OTHER; note = 2'-deoxy-2'-fluoroadenosine-3'-phosphate
  modified_base 11: mod_base = OTHER; note = 2'-deoxy-2'-fluorocytidine-3'-phosphate
  modified_base 12: mod_base = OTHER; note = 2'-O-methyladenosine-3'-phosphate
  modified_base 13: mod_base = OTHER; note = 2'-O-methyladenosine-3'-phosphate
  modified_base 14: mod_base = OTHER; note = 2'-O-methyladenosine-3'-phosphate
  modified_base 15: mod_base = OTHER; note = 2'-O-methylguanosine-3'-phosphate
  modified_base 16: mod_base = OTHER; note = 2'-O-methylguanosine-3'-phosphate
  modified_base 17: mod_base = OTHER; note = 2'-O-methyluridine-3'-phosphate
  modified_base 18: mod_base = OTHER; note = 2'-O-methylguanosine-3'-phosphate
  modified_base 19: mod_base = OTHER; note = 2'-O-methylguanosine-3'-phosphate
  modified_base 20: mod_base = OTHER; note = 2'-O-methyladenosine-3'-phosphate
  modified_base 21: mod_base = OTHER; note = 2'-O-methyluridine-3'-phosphate ((2S,4R)-1-[29-[[2-(acetylamino)-2-deoxy-beta-D-galactopyra nosyl]oxy]-14,14-bis[[3-[[3-[[5-[[2-(acetylamino)-2-deoxy-b eta-D-galactopyranosyl]oxy]-1-oxopentyl]amino]propyl]amino] -3-oxopropoxy]methyl]-1,12,19,25-tetraoxo-16-oxa-13,20,24-t riazanonacos-1-yl]-4-hydroxy-2-pyrrolidinyl)methyl ester
aaatgaaagacaaaggtggat

SEQ ID NO: 1647 - RNA, 21 nt, synthetic construct
  source 1..21: mol_type = other RNA
  modified_base 1: mod_base = OTHER; note = 2'-O-methyluridine-3'-phosphorothioate
  modified_base 2: mod_base = OTHER; note = 2'-O-methylguanosine-3'-phosphorothioate
  modified_base 3: mod_base = OTHER; note = 2'-O-methyladenosine-3'-phosphate
  modified_base 4: mod_base = OTHER; note = 2'-O-methylguanosine-3'-phosphate
  modified_base 5: mod_base = OTHER; note = 2'-O-methyluridine-3'-phosphate
  modified_base 6: mod_base = OTHER; note = 2'-O-methylguanosine-3'-phosphate
  modified_base 7: mod_base = OTHER; note = 2'-deoxy-2'-fluoroadenosine-3'-phosphate
  modified_base 8: mod_base = OTHER; note = 2'-O-methyladenosine-3'-phosphate
  modified_base 9: mod_base = OTHER; note = 2'-deoxy-2'-fluoroguanosine-3'-phosphate
  modified_base 10: mod_base = OTHER; note = 2'-deoxy-2'-fluoroadenosine-3'-phosphate
  modified_base 11: mod_base = OTHER; note = 2'-deoxy-2'-fluoroadenosine-3'-phosphate
  modified_base 12: mod_base = OTHER; note = 2'-O-methyladenosine-3'-phosphate
  modified_base 13: mod_base = OTHER; note = 2'-O-methyluridine-3'-phosphate
  modified_base 14: mod_base = OTHER; note = 2'-O-methylguanosine-3'-phosphate
  modified_base 15: mod_base = OTHER; note = 2'-O-methyladenosine-3'-phosphate
  modified_base 16: mod_base = OTHER; note = 2'-O-methyladenosine-3'-phosphate
  modified_base 17: mod_base = OTHER; note = 2'-O-methyladenosine-3'-phosphate
  modified_base 18: mod_base = OTHER; note = 2'-O-methylguanosine-3'-phosphate
  modified_base 19: mod_base = OTHER; note = 2'-O-methyladenosine-3'-phosphate
  modified_base 20: mod_base = OTHER; note = 2'-O-methylcytidine-3'-phosphate
  modified_base 21: mod_base = OTHER; note = 2'-O-methyladenosine-3'-phosphate ((2S,4R)-1-[29-[[2-(acetylamino)-2-deoxy-beta-D-galactopyra nosyl]oxy]-14,14-bis[[3-[[3-[[5-[[2-(acetylamino)-2-deoxy-b eta-D-galactopyranosyl]oxy]-1-oxopentyl]amino]propyl]amino] -3-oxopropoxy]methyl]-1,12,19,25-tetraoxo-16-oxa-13,20,24-t riazanonacos-1-yl]-4-hydroxy-2-pyrrolidinyl)methyl ester
tgagtgaagaaatgaaagaca

SEQ ID NO: 1648 - RNA, 21 nt, synthetic construct
  source 1..21: mol_type = other RNA
  modified_base 1: mod_base = OTHER; note = 2'-O-methyluridine-3'-phosphorothioate
  modified_base 2: mod_base = OTHER; note = 2'-O-methyladenosine-3'-phosphorothioate
  modified_base 3: mod_base = OTHER; note = 2'-O-methylcytidine-3'-phosphate
  modified_base 4: mod_base = OTHER; note = 2'-O-methylcytidine-3'-phosphate
  modified_base 5: mod_base = OTHER; note = 2'-O-methyluridine-3'-phosphate
  modified_base 6: mod_base = OTHER; note = 2'-O-methylguanosine-3'-phosphate
  modified_base 7: mod_base = OTHER; note = 2'-deoxy-2'-fluorouridine-3'-phosphate
  modified_base 8: mod_base = OTHER; note = 2'-O-methyluridine-3'-phosphate
  modified_base 9: mod_base = OTHER; note = 2'-deoxy-2'-fluoroguanosine-3'-phosphate
  modified_base 10: mod_base = OTHER; note = 2'-deoxy-2'-fluoroadenosine-3'-phosphate
  modified_base 11: mod_base = OTHER; note = 2'-deoxy-2'-fluoroadenosine-3'-phosphate
  modified_base 12: mod_base = OTHER; note = 2'-O-methyluridine-3'-phosphate
  modified_base 13: mod_base = OTHER; note = 2'-O-methyluridine-3'-phosphate
  modified_base 14: mod_base = OTHER; note = 2'-O-methyluridine-3'-phosphate
  modified_base 15: mod_base = OTHER; note = 2'-O-methyluridine-3'-phosphate
  modified_base 16: mod_base = OTHER; note = 2'-O-methylguanosine-3'-phosphate
  modified_base 17: mod_base = OTHER; note = 2'-O-methyluridine-3'-phosphate
  modified_base 18: mod_base = OTHER; note = 2'-O-methyladenosine-3'-phosphate
  modified_base 19: mod_base = OTHER; note = 2'-O-methyluridine-3'-phosphate
  modified_base 20: mod_base = OTHER; note = 2'-O-methyluridine-3'-phosphate
  modified_base 21: mod_base = OTHER; note = 2'-O-methyladenosine-3'-phosphate ((2S,4R)-1-[29-[[2-(acetylamino)-2-deoxy-beta-D-galactopyra nosyl]oxy]-14,14-bis[[3-[[3-[[5-[[2-(acetylamino)-2-deoxy-b eta-D-galactopyranosyl]oxy]-1-oxopentyl]amino]propyl]amino] -3-oxopropoxy]methyl]-1,12,19,25-tetraoxo-16-oxa-13,20,24-t riazanonacos-1-yl]-4-hydroxy-2-pyrrolidinyl)methyl ester
tacctgttgaattttgtatta

SEQ ID NO: 1649 - RNA, 21 nt, synthetic construct
  source 1..21: mol_type = other RNA
  modified_base 1: mod_base = OTHER; note = 2'-O-methyluridine-3'-phosphorothioate
  modified_base 2: mod_base = OTHER; note = 2'-O-methyluridine-3'-phosphorothioate
  modified_base 3: mod_base = OTHER; note = 2'-O-methylguanosine-3'-phosphate
  modified_base 4: mod_base = OTHER; note = 2'-O-methylcytidine-3'-phosphate
  modified_base 5: mod_base = OTHER; note = 2'-O-methyluridine-3'-phosphate
  modified_base 6: mod_base = OTHER; note = 2'-O-methyladenosine-3'-phosphate
  modified_base 7: mod_base = OTHER; note = 2'-deoxy-2'-fluorocytidine-3'-phosphate
  modified_base 8: mod_base = OTHER; note = 2'-O-methylcytidine-3'-phosphate
  modified_base 9: mod_base = OTHER; note = 2'-deoxy-2'-fluorocytidine-3'-phosphate
  modified_base 10: mod_base = OTHER; note = 2'-deoxy-2'-fluoroadenosine-3'-phosphate
  modified_base 11: mod_base = OTHER; note = 2'-deoxy-2'-fluorouridine-3'-phosphate
  modified_base 12: mod_base = OTHER; note = 2'-O-methyluridine-3'-phosphate
  modified_base 13: mod_base = OTHER; note = 2'-O-methyladenosine-3'-phosphate
  modified_base 14: mod_base = OTHER; note = 2'-O-methylguanosine-3'-phosphate
  modified_base 15: mod_base = OTHER; note = 2'-O-methylguanosine-3'-phosphate
  modified_base 16: mod_base = OTHER; note = 2'-O-methyladenosine-3'-phosphate
  modified_base 17: mod_base = OTHER; note = 2'-O-methyluridine-3'-phosphate
  modified_base 18: mod_base = OTHER; note = 2'-O-methyladenosine-3'-phosphate
  modified_base 19: mod_base = OTHER; note = 2'-O-methyladenosine-3'-phosphate
  modified_base 20: mod_base = OTHER; note = 2'-O-methyluridine-3'-phosphate
  modified_base 21: mod_base = OTHER; note = 2'-O-methyladenosine-3'-phosphate ((2S,4R)-1-[29-[[2-(acetylamino)-2-deoxy-beta-D-galactopyra nosyl]oxy]-14,14-bis[[3-[[3-[[5-[[2-(acetylamino)-2-deoxy-b eta-D-galactopyranosyl]oxy]-1-oxopentyl]amino]propyl]amino] -3-oxopropoxy]methyl]-1,12,19,25-tetraoxo-16-oxa-13,20,24-t riazanonacos-1-yl]-4-hydroxy-2-pyrrolidinyl)methyl ester
ttgctacccattaggataata

SEQ ID NO: 1650 - RNA, 21 nt, synthetic construct
  source 1..21: mol_type = other RNA
  modified_base 1: mod_base = OTHER; note = 2'-O-methyluridine-3'-phosphorothioate
  modified_base 2: mod_base = OTHER; note = 2'-O-methyluridine-3'-phosphorothioate
  modified_base 3: mod_base = OTHER; note = 2'-O-methyladenosine-3'-phosphate
  modified_base 4: mod_base = OTHER; note = 2'-O-methyluridine-3'-phosphate
  modified_base 5: mod_base = OTHER; note = 2'-O-methylguanosine-3'-phosphate
  modified_base 6: mod_base = OTHER; note = 2'-O-methyluridine-3'-phosphate
  modified_base 7: mod_base = OTHER; note = 2'-deoxy-2'-fluoroadenosine-3'-phosphate
  modified_base 8: mod_base = OTHER; note = 2'-O-methyladenosine-3'-phosphate
  modified_base 9: mod_base = OTHER; note = 2'-deoxy-2'-fluorouridine-3'-phosphate
  modified_base 10: mod_base = OTHER; note = 2'-deoxy-2'-fluoroguanosine-3'-phosphate
  modified_base 11: mod_base = OTHER; note = 2'-deoxy-2'-fluorocytidine-3'-phosphate
  modified_base 12: mod_base = OTHER; note = 2'-O-methyluridine-3'-phosphate
  modified_base 13: mod_base = OTHER; note = 2'-O-methylguanosine-3'-phosphate
  modified_base 14: mod_base = OTHER; note = 2'-O-methylcytidine-3'-phosphate
  modified_base 15: mod_base = OTHER; note = 2'-O-methylcytidine-3'-phosphate
  modified_base 16: mod_base = OTHER; note = 2'-O-methylcytidine-3'-phosphate
  modified_base 17: mod_base = OTHER; note = 2'-O-methyluridine-3'-phosphate
  modified_base 18: mod_base = OTHER; note = 2'-O-methylguanosine-3'-phosphate
  modified_base 19: mod_base = OTHER; note = 2'-O-methyluridine-3'-phosphate
  modified_base 20: mod_base = OTHER; note = 2'-O-methyladenosine-3'-phosphate
  modified_base 21: mod_base = OTHER; note = 2'-O-methyladenosine-3'-phosphate ((2S,4R)-1-[29-[[2-(acetylamino)-2-deoxy-beta-D-galactopyra nosyl]oxy]-14,14-bis[[3-[[3-[[5-[[2-(acetylamino)-2-deoxy-b eta-D-galactopyranosyl]oxy]-1-oxopentyl]amino]propyl]amino] -3-oxopropoxy]methyl]-1,12,19,25-tetraoxo-16-oxa-13,20,24-t riazanonacos-1-yl]-4-hydroxy-2-pyrrolidinyl)methyl ester
ttatgtaatgctgccctgtaa

SEQ ID NO: 1651 - RNA, 21 nt, synthetic construct
  source 1..21: mol_type = other RNA
  modified_base 1: mod_base = OTHER; note = 2'-O-methylguanosine-3'-phosphorothioate
  modified_base 2: mod_base = OTHER; note = 2'-O-methyladenosine-3'-phosphorothioate
  modified_base 3: mod_base = OTHER; note = 2'-O-methyluridine-3'-phosphate
  modified_base 4: mod_base = OTHER; note = 2'-O-methyluridine-3'-phosphate
  modified_base 5: mod_base = OTHER; note = 2'-O-methyluridine-3'-phosphate
  modified_base 6: mod_base = OTHER; note = 2'-O-methylguanosine-3'-phosphate
  modified_base 7: mod_base = OTHER; note = 2'-deoxy-2'-fluorocytidine-3'-phosphate
  modified_base 8: mod_base = OTHER; note = 2'-O-methyladenosine-3'-phosphate
  modified_base 9: mod_base = OTHER; note = 2'-deoxy-2'-fluoroadenosine-3'-phosphate
  modified_base 10: mod_base = OTHER; note = 2'-deoxy-2'-fluorocytidine-3'-phosphate
  modified_base 11: mod_base = OTHER; note = 2'-deoxy-2'-fluorouridine-3'-phosphate
  modified_base 12: mod_base = OTHER; note = 2'-O-methyluridine-3'-phosphate
  modified_base 13: mod_base = OTHER; note = 2'-O-methylguanosine-3'-phosphate
  modified_base 14: mod_base = OTHER; note = 2'-O-methylcytidine-3'-phosphate
  modified_base 15: mod_base = OTHER; note = 2'-O-methyluridine-3'-phosphate
  modified_base 16: mod_base = OTHER; note = 2'-O-methyladenosine-3'-phosphate
  modified_base 17: mod_base = OTHER; note = 2'-O-methylcytidine-3'-phosphate
  modified_base 18: mod_base = OTHER; note = 2'-O-methylcytidine-3'-phosphate
  modified_base 19: mod_base = OTHER; note = 2'-O-methylcytidine-3'-phosphate
  modified_base 20: mod_base = OTHER; note = 2'-O-methyladenosine-3'-phosphate
  modified_base 21: mod_base = OTHER; note = 2'-O-methyluridine-3'-phosphate ((2S,4R)-1-[29-[[2-(acetylamino)-2-deoxy-beta-D-galactopyra nosyl]oxy]-14,14-bis[[3-[[3-[[5-[[2-(acetylamino)-2-deoxy-b eta-D-galactopyranosyl]oxy]-1-oxopentyl]amino]propyl]amino] -3-oxopropoxy]methyl]-1,12,19,25-tetraoxo-16-oxa-13,20,24-t riazanonacos-1-yl]-4-hydroxy-2-pyrrolidinyl)methyl ester
gatttgcaacttgctacccat

SEQ ID NO: 1652 - RNA, 23 nt, synthetic construct
  source 1..23: mol_type = other RNA
  modified_base 1: mod_base = OTHER; note = 2'-O-methyluridine-3'-phosphorothioate
  modified_base 2: mod_base = OTHER; note = 2'-deoxy-2'-fluoroadenosine-3'-phosphorothioate
  modified_base 3: mod_base = OTHER; note = 2'-O-methylcytidine-3'-phosphate
  modified_base 4: mod_base = OTHER; note = 2'-O-methyladenosine-3'-phosphate
  modified_base 5: mod_base = OTHER; note = 2'-O-methyluridine-3'-phosphate
  modified_base 6: mod_base = OTHER; note = 2'-deoxy-2'-fluoroadenosine-3'-phosphate
  modified_base 7: mod_base = OTHER; note = 2'-O-methyladenosine-3'-phosphate
  modified_base 8: mod_base = OTHER; note = 2'-deoxy-2'-fluoroguanosine-3'-phosphate
  modified_base 9: mod_base = OTHER; note = 2'-deoxy-2'-fluoroadenosine-3'-phosphate
  modified_base 10: mod_base = OTHER; note = 2'-O-methylcytidine-3'-phosphate
  modified_base 11: mod_base = OTHER; note = 2'-O-methyladenosine-3'-phosphate
  modified_base 12: mod_base = OTHER; note = 2'-O-methyluridine-3'-phosphate
  modified_base 13: mod_base = OTHER; note = 2'-O-methyluridine-3'-phosphate
  modified_base 14: mod_base = OTHER; note = 2'-deoxy-2'-fluoroadenosine-3'-phosphate
  modified_base 15: mod_base = OTHER; note = 2'-O-methyluridine-3'-phosphate
  modified_base 16: mod_base = OTHER; note = 2'-deoxy-2'-fluorocytidine-3'-phosphate
  modified_base 17: mod_base = OTHER; note = 2'-O-methylcytidine-3'-phosphate
  modified_base 18: mod_base = OTHER; note = 2'-O-methyluridine-3'-phosphate
  modified_base 19: mod_base = OTHER; note = 2'-O-methyladenosine-3'-phosphate
  modified_base 20: mod_base = OTHER; note = 2'-O-methyladenosine-3'-phosphate
  modified_base 21: mod_base = OTHER; note = 2'-O-methyluridine-3'-phosphorothioate
  modified_base 22: mod_base = OTHER; note = 2'-O-methylguanosine-3'-phosphorothioate
  modified_base 23: mod_base = OTHER; note = 2'-O-methylguanosine
tacataagacattatcctaatgg

SEQ ID NO: 1653 - RNA, 23 nt, synthetic construct
  source 1..23: mol_type = other RNA
  modified_base 1: mod_base = OTHER; note = 2'-O-methyluridine-3'-phosphorothioate
  modified_base 2: mod_base = OTHER; note = 2'-deoxy-2'-fluorouridine-3'-phosphorothioate
  modified_base 3: mod_base = OTHER; note = 2'-O-methyluridine-3'-phosphate
  modified_base 4: mod_base = OTHER; note = 2'-O-methyluridine-3'-phosphate
  modified_base 5: mod_base = OTHER; note = 2'-O-methylcytidine-3'-phosphate
  modified_base 6: mod_base = OTHER; note = 2'-deoxy-2'-fluoroadenosine-3'-phosphate
  modified_base 7: mod_base = OTHER; note = 2'-O-methyluridine-3'-phosphate
  modified_base 8: mod_base = OTHER; note = 2'-deoxy-2'-fluoroadenosine-3'-phosphate
  modified_base 9: mod_base = OTHER; note = 2'-deoxy-2'-fluoroadenosine-3'-phosphate
  modified_base 10: mod_base = OTHER; note = 2'-O-methyladenosine-3'-phosphate
  modified_base 11: mod_base = OTHER; note = 2'-O-methyladenosine-3'-phosphate
  modified_base 12: mod_base = OTHER; note = 2'-O-methylcytidine-3'-phosphate
  modified_base 13: mod_base = OTHER; note = 2'-O-methylcytidine-3'-phosphate
  modified_base 14: mod_base = OTHER; note = 2'-deoxy-2'-fluoroadenosine-3'-phosphate
  modified_base 15: mod_base = OTHER; note = 2'-O-methyladenosine-3'-phosphate
  modified_base 16: mod_base = OTHER; note = 2'-deoxy-2'-fluorocytidine-3'-phosphate
  modified_base 17: mod_base = OTHER; note = 2'-O-methyluridine-3'-phosphate
  modified_base 18: mod_base = OTHER; note = 2'-O-methylcytidine-3'-phosphate
  modified_base 19: mod_base = OTHER; note = 2'-O-methyladenosine-3'-phosphate
  modified_base 20: mod_base = OTHER; note = 2'-O-methylguanosine-3'-phosphate
  modified_base 21: mod_base = OTHER; note = 2'-O-methylcytidine-3'-phosphorothioate
  modified_base 22: mod_base = OTHER; note = 2'-O-methyluridine-3'-phosphorothioate
  modified_base 23: mod_base = OTHER; note = 2'-O-methylcytidine
ttttcataaaaccaactcagctc

SEQ ID NO: 1654 - RNA, 23 nt, synthetic construct
  source 1..23: mol_type = other RNA
  modified_base 1: mod_base = OTHER; note = 2'-O-methyluridine-3'-phosphorothioate
  modified_base 2: mod_base = OTHER; note = 2'-deoxy-2'-fluorouridine-3'-phosphorothioate
  modified_base 3: mod_base = OTHER; note = 2'-O-methyluridine-3'-phosphate
  modified_base 4: mod_base = OTHER; note = 2'-O-methyladenosine-3'-phosphate
  modified_base 5: mod_base = OTHER; note = 2'-O-methylguanosine-3'-phosphate
  modified_base 6: mod_base = OTHER; note = 2'-deoxy-2'-fluorouridine-3'-phosphate
  modified_base 7: mod_base = OTHER; note = 2'-O-methyluridine-3'-phosphate
  modified_base 8: mod_base = OTHER; note = 2'-deoxy-2'-fluoroadenosine-3'-phosphate
  modified_base 9: mod_base = OTHER; note = 2'-deoxy-2'-fluoroguanosine-3'-phosphate
  modified_base 10: mod_base = OTHER; note = 2'-O-methylguanosine-3'-phosphate
  modified_base 11: mod_base = OTHER; note = 2'-O-methyluridine-3'-phosphate
  modified_base 12: mod_base = OTHER; note = 2'-O-methylguanosine-3'-phosphate
  modified_base 13: mod_base = OTHER; note = 2'-O-methyladenosine-3'-phosphate
  modified_base 14: mod_base = OTHER; note = 2'-deoxy-2'-fluoroadenosine-3'-phosphate
  modified_base 15: mod_base = OTHER; note = 2'-O-methyladenosine-3'-phosphate
  modified_base 16: mod_base = OTHER; note = 2'-deoxy-2'-fluoroadenosine-3'-phosphate
  modified_base 17: mod_base = OTHER; note = 2'-O-methyladenosine-3'-phosphate
  modified_base 18: mod_base = OTHER; note = 2'-O-methylguanosine-3'-phosphate
  modified_base 19: mod_base = OTHER; note = 2'-O-methylguanosine-3'-phosphate
  modified_base 20: mod_base = OTHER; note = 2'-O-methyluridine-3'-phosphate
  modified_base 21: mod_base = OTHER; note = 2'-O-methylguanosine-3'-phosphorothioate
  modified_base 22: mod_base = OTHER; note = 2'-O-methyluridine-3'-phosphorothioate
  modified_base 23: mod_base = OTHER; note = 2'-O-methyluridine
tttagttaggtgaaaaaggtgtt

SEQ ID NO: 1655 - RNA, 23 nt, synthetic construct
  source 1..23: mol_type = other RNA
  modified_base 1: mod_base = OTHER; note = 2'-O-methyluridine-3'-phosphorothioate
  modified_base 2: mod_base = OTHER; note = 2'-deoxy-2'-fluorouridine-3'-phosphorothioate
  modified_base 3: mod_base = OTHER; note = 2'-O-methyladenosine-3'-phosphate
  modified_base 4: mod_base = OTHER; note = 2'-O-methyluridine-3'-phosphate
  modified_base 5: mod_base = OTHER; note = 2'-O-methyluridine-3'-phosphate
  modified_base 6: mod_base = OTHER; note = 2'-deoxy-2'-fluorouridine-3'-phosphate
  modified_base 7: mod_base = OTHER; note = 2'-O-methyluridine-3'-phosphate
  modified_base 8: mod_base = OTHER; note = 2'-deoxy-2'-fluoroadenosine-3'-phosphate
  modified_base 9: mod_base = OTHER; note = 2'-deoxy-2'-fluoroguanosine-3'-phosphate
  modified_base 10: mod_base = OTHER; note = 2'-O-methyluridine-3'-phosphate
  modified_base 11: mod_base = OTHER; note = 2'-O-methyluridine-3'-phosphate
  modified_base 12: mod_base = OTHER; note = 2'-O-methyladenosine-3'-phosphate
  modified_base 13: mod_base = OTHER; note = 2'-O-methylguanosine-3'-phosphate
  modified_base 14: mod_base = OTHER; note = 2'-deoxy-2'-fluoroguanosine-3'-phosphate
  modified_base 15: mod_base = OTHER; note = 2'-O-methyluridine-3'-phosphate
  modified_base 16: mod_base = OTHER; note = 2'-deoxy-2'-fluoroguanosine-3'-phosphate
  modified_base 17: mod_base = OTHER; note = 2'-O-methyladenosine-3'-phosphate
  modified_base 18: mod_base = OTHER; note = 2'-O-methyladenosine-3'-phosphate
  modified_base 19: mod_base = OTHER; note = 2'-O-methyladenosine-3'-phosphate
  modified_base 20: mod_base = OTHER; note = 2'-O-methyladenosine-3'-phosphate
  modified_base 21: mod_base = OTHER; note = 2'-O-methyladenosine-3'-phosphorothioate
  modified_base 22: mod_base = OTHER; note = 2'-O-methylguanosine-3'-phosphorothioate
  modified_base 23: mod_base = OTHER; note = 2'-O-methylguanosine
ttattttagttaggtgaaaaagg

SEQ ID NO: 1656 - RNA, 23 nt, synthetic construct
  source 1..23: mol_type = other RNA
  modified_base 1: mod_base = OTHER; note = 2'-O-methyluridine-3'-phosphorothioate
  modified_base 2: mod_base = OTHER; note = 2'-deoxy-2'-fluoroadenosine-3'-phosphorothioate
  modified_base 3: mod_base = OTHER; note = 2'-O-methyladenosine-3'-phosphate
  modified_base 4: mod_base = OTHER; note = 2'-O-methyladenosine-3'-phosphate
  modified_base 5: mod_base = OTHER; note = 2'-O-methylcytidine-3'-phosphate
  modified_base 6: mod_base = OTHER; note = 2'-deoxy-2'-fluoroadenosine-3'-phosphate
  modified_base 7: mod_base = OTHER; note = 2'-O-methyluridine-3'-phosphate
  modified_base 8: mod_base = OTHER; note = 2'-deoxy-2'-fluorouridine-3'-phosphate
  modified_base 9: mod_base = OTHER; note = 2'-deoxy-2'-fluoroadenosine-3'-phosphate
  modified_base 10: mod_base = OTHER; note = 2'-O-methyluridine-3'-phosphate
  modified_base 11: mod_base = OTHER; note = 2'-O-methyluridine-3'-phosphate
  modified_base 12: mod_base = OTHER; note = 2'-O-methyluridine-3'-phosphate
  modified_base 13: mod_base = OTHER; note = 2'-O-methyluridine-3'-phosphate
  modified_base 14: mod_base = OTHER; note = 2'-deoxy-2'-fluoroadenosine-3'-phosphate
  modified_base 15: mod_base = OTHER; note = 2'-O-methylguanosine-3'-phosphate
  modified_base 16: mod_base = OTHER; note = 2'-deoxy-2'-fluorouridine-3'-phosphate
  modified_base 17: mod_base = OTHER; note = 2'-O-methyluridine-3'-phosphate
  modified_base 18: mod_base = OTHER; note = 2'-O-methyladenosine-3'-phosphate
  modified_base 19: mod_base = OTHER; note = 2'-O-methylguanosine-3'-phosphate
  modified_base 20: mod_base = OTHER; note = 2'-O-methylguanosine-3'-phosphate
  modified_base 21: mod_base = OTHER; note = 2'-O-methyluridine-3'-phosphorothioate
  modified_base 22: mod_base = OTHER; note = 2'-O-methylguanosine-3'-phosphorothioate
  modified_base 23: mod_base = OTHER; note = 2'-O-methyladenosine
taaacattattttagttaggtga

SEQ ID NO: 1657 - RNA, 23 nt, synthetic construct
  source 1..23: mol_type = other RNA
  modified_base 1: mod_base = OTHER; note = 2'-O-methyladenosine-3'-phosphorothioate
  modified_base 2: mod_base = OTHER; note = 2'-deoxy-2'-fluoroguanosine-3'-phosphorothioate
  modified_base 3: mod_base = OTHER; note = 2'-O-methyladenosine-3'-phosphate
  modified_base 4: mod_base = OTHER; note = 2'-O-methyluridine-3'-phosphate
  modified_base 5: mod_base = OTHER; note = 2'-O-methyluridine-3'-phosphate
  modified_base 6: mod_base = OTHER; note = 2'-deoxy-2'-fluoroadenosine-3'-phosphate
  modified_base 7: mod_base = OTHER; note = 2'-O-methyluridine-3'-phosphate
  modified_base 8: mod_base = OTHER; note = 2'-deoxy-2'-fluorocytidine-3'-phosphate
  modified_base 9: mod_base = OTHER; note = 2'-deoxy-2'-fluoroadenosine-3'-phosphate
  modified_base 10: mod_base = OTHER; note = 2'-O-methyluridine-3'-phosphate
  modified_base 11: mod_base = OTHER; note = 2'-O-methylcytidine-3'-phosphate
  modified_base 12: mod_base = OTHER; note = 2'-O-methyluridine-3'-phosphate
  modified_base 13: mod_base = OTHER; note = 2'-O-methyluridine-3'-phosphate
  modified_base 14: mod_base = OTHER; note = 2'-deoxy-2'-fluoroguanosine-3'-phosphate
  modified_base 15: mod_base = OTHER; note = 2'-O-methyluridine-3'-phosphate
  modified_base 16: mod_base = OTHER; note = 2'-deoxy-2'-fluorouridine-3'-phosphate
  modified_base 17: mod_base = OTHER; note = 2'-O-methyladenosine-3'-phosphate
  modified_base 18: mod_base = OTHER; note = 2'-O-methylcytidine-3'-phosphate
  modified_base 19: mod_base = OTHER; note = 2'-O-methylcytidine-3'-phosphate
  modified_base 20: mod_base = OTHER; note = 2'-O-methylcytidine-3'-phosphate
  modified_base 21: mod_base = OTHER; note = 2'-O-methylcytidine-3'-phosphorothioate
  modified_base 22: mod_base = OTHER; note = 2'-O-methylcytidine-3'-phosphorothioate
  modified_base 23: mod_base = OTHER; note = 2'-O-methylguanosine
agattatcatcttgttacccccg

SEQ ID NO: 1658 - RNA, 23 nt, synthetic construct
  source 1..23: mol_type = other RNA
  modified_base 1: mod_base = OTHER; note = 2'-O-methyluridine-3'-phosphorothioate
  modified_base 2: mod_base = OTHER; note = 2'-deoxy-2'-fluorouridine-3'-phosphorothioate
  modified_base 3: mod_base = OTHER; note = 2'-O-methyluridine-3'-phosphate
  modified_base 4: mod_base = OTHER; note = 2'-O-methylguanosine-3'-phosphate
  modified_base 5: mod_base = OTHER; note = 2'-O-methyluridine-3'-phosphate
  modified_base 6: mod_base = OTHER; note = 2'-deoxy-2'-fluorouridine-3'-phosphate
  modified_base 7: mod_base = OTHER; note = 2'-O-methyladenosine-3'-phosphate
  modified_base 8: mod_base = OTHER; note = 2'-deoxy-2'-fluorocytidine-3'-phosphate
  modified_base 9: mod_base = OTHER; note = 2'-deoxy-2'-fluorocytidine-3'-phosphate
  modified_base 10: mod_base = OTHER; note = 2'-O-methylcytidine-3'-phosphate
  modified_base 11: mod_base = OTHER; note = 2'-O-methylcytidine-3'-phosphate
  modified_base 12: mod_base = OTHER; note = 2'-O-methylcytidine-3'-phosphate
  modified_base 13: mod_base = OTHER; note = 2'-O-methylguanosine-3'-phosphate
  modified_base 14: mod_base = OTHER; note = 2'-deoxy-2'-fluorocytidine-3'-phosphate
  modified_base 15: mod_base = OTHER; note = 2'-O-methylcytidine-3'-phosphate
  modified_base 16: mod_base = OTHER; note = 2'-deoxy-2'-fluoroadenosine-3'-phosphate
  modified_base 17: mod_base = OTHER; note = 2'-O-methyluridine-3'-phosphate
  modified_base 18: mod_base = OTHER; note = 2'-O-methylguanosine-3'-phosphate
  modified_base 19: mod_base = OTHER; note = 2'-O-methylguanosine-3'-phosphate
  modified_base 20: mod_base = OTHER; note = 2'-O-methyladenosine-3'-phosphate
  modified_base 21: mod_base = OTHER; note = 2'-O-methylguanosine-3'-phosphorothioate
  modified_base 22: mod_base = OTHER; note = 2'-O-methyladenosine-3'-phosphorothioate
  modified_base 23: mod_base = OTHER; note = 2'-O-methylcytidine
tttgttacccccgccatggagac

SEQ ID NO: 1659 - DNA, 23 bp, synthetic construct
  source 1..23: mol_type = other DNA
  modified_base 1: mod_base = OTHER; note = 2'-O-methyladenosine-3'-phosphorothioate
  modified_base 2: mod_base = OTHER; note = 2'-deoxythymidine-3'-phosphorothioate
  modified_base 3: mod_base = OTHER; note = 2'-O-methyluridine-3'-phosphate
  modified_base 4: mod_base = OTHER; note = 2'-O-methyladenosine-3'-phosphate
  modified_base 6: mod_base = OTHER; note = 2'-O-methyladenosine-3'-phosphate
  modified_base 8: mod_base = OTHER; note = 2'-O-methyladenosine-3'-phosphate
  modified_base 9: mod_base = OTHER; note = 2'-O-methyladenosine-3'-phosphate
  modified_base 10: mod_base = OTHER; note = 2'-O-methylguanosine-3'-phosphate
  modified_base 11: mod_base = OTHER; note = 2'-O-methyladenosine-3'-phosphate
  modified_base 13: mod_base = OTHER; note = 2'-O-methyladenosine-3'-phosphate
  modified_base 14: mod_base = OTHER; note = 2'-deoxy-2'-fluorouridine-3'-phosphate
  modified_base 15: mod_base = OTHER; note = 2'-O-methyluridine-3'-phosphate
  modified_base 16: mod_base = OTHER; note = 2'-O-methyladenosine-3'-phosphate
  modified_base 17: mod_base = OTHER; note = 2'-O-methyluridine-3'-phosphate
  modified_base 18: mod_base = OTHER; note = 2'-O-methylcytidine-3'-phosphate
  modified_base 19: mod_base = OTHER; note = 2'-O-methylcytidine-3'-phosphate
  modified_base 20: mod_base = OTHER; note = 2'-O-methyluridine-3'-phosphate
  modified_base 21: mod_base = OTHER; note = 2'-O-methyladenosine-3'-phosphorothioate
  modified_base 22: mod_base = OTHER; note = 2'-O-methyladenosine-3'-phosphorothioate
  modified_base 23: mod_base = OTHER; note = 2'-O-methyluridine
  misc_feature 1: note = RNA
  misc_feature 3..4: note = RNA
  misc_feature 6: note = RNA
  misc_feature 8..11: note = RNA
  misc_feature 13..23: note = RNA
  misc_feature 2: note = DNA
  misc_feature 5: note = DNA
  misc_feature 7: note = DNA
  misc_feature 12: note = DNA
attacataagacattatcctaat

SEQ ID NO: 1660 - DNA, 23 bp, synthetic construct
  source 1..23: mol_type = other DNA
  modified_base 1: mod_base = OTHER; note = 2'-O-methyluridine-3'-phosphorothioate
  modified_base 2: mod_base = OTHER; note = 2'-deoxythymidine-3'-phosphorothioate
  modified_base 3: mod_base = OTHER; note = 2'-O-methyladenosine-3'-phosphate
  modified_base 4: mod_base = OTHER; note = 2'-O-methyladenosine-3'-phosphate
  modified_base 6: mod_base = OTHER; note = 2'-O-methylcytidine-3'-phosphate
  modified_base 8: mod_base = OTHER; note = 2'-O-methyluridine-3'-phosphate
  modified_base 9: mod_base = OTHER; note = 2'-O-methyluridine-3'-phosphate
  modified_base 10: mod_base = OTHER; note = 2'-O-methyladenosine-3'-phosphate
  modified_base 11: mod_base = OTHER; note = 2'-O-methyluridine-3'-phosphate
  modified_base 13: mod_base = OTHER; note = 2'-O-methyluridine-3'-phosphate
  modified_base 14: mod_base = OTHER; note = 2'-deoxy-2'-fluorouridine-3'-phosphate
  modified_base 15: mod_base = OTHER; note = 2'-O-methyladenosine-3'-phosphate
  modified_base 16: mod_base = OTHER; note = 2'-O-methylguanosine-3'-phosphate
  modified_base 17: mod_base = OTHER; note = 2'-O-methyluridine-3'-phosphate
  modified_base 18: mod_base = OTHER; note = 2'-O-methyluridine-3'-phosphate
  modified_base 19: mod_base = OTHER; note = 2'-O-methyladenosine-3'-phosphate
  modified_base 20: mod_base = OTHER; note = 2'-O-methylguanosine-3'-phosphate
  modified_base 21: mod_base = OTHER; note = 2'-O-methylguanosine-3'-phosphorothioate
  modified_base 22: mod_base = OTHER; note = 2'-O-methyluridine-3'-phosphorothioate
  modified_base 23: mod_base = OTHER; note = 2'-O-methylguanosine
  misc_feature 1: note = RNA
  misc_feature 3..4: note = RNA
  misc_feature 6: note = RNA
  misc_feature 8..11: note = RNA
  misc_feature 13..23: note = RNA
  misc_feature 2: note = DNA
  misc_feature 5: note = DNA
  misc_feature 7: note = DNA
  misc_feature 12: note = DNA
ttaaacattattttagttaggtg

SEQ ID NO: 1661 - DNA, 23 bp, synthetic construct
  source 1..23: mol_type = other DNA
  modified_base 1: mod_base = OTHER; note = 2'-O-methyluridine-3'-phosphorothioate
  modified_base 2: mod_base = OTHER; note = 2'-deoxyadenosine-3'-phosphorothioate
  modified_base 3: mod_base = OTHER; note = 2'-O-methyladenosine-3'-phosphate
  modified_base 4: mod_base = OTHER; note = 2'-O-methylguanosine-3'-phosphate
  modified_base 6: mod_base = OTHER; note = 2'-O-methylcytidine-3'-phosphate
  modified_base 8: mod_base = OTHER; note = 2'-O-methyluridine-3'-phosphate
  modified_base 9: mod_base = OTHER; note = 2'-O-methyladenosine-3'-phosphate
  modified_base 10: mod_base = OTHER; note = 2'-O-methyluridine-3'-phosphate
  modified_base 11: mod_base = OTHER; note = 2'-O-methyluridine-3'-phosphate
  modified_base 13: mod_base = OTHER; note = 2'-O-methyluridine-3'-phosphate
  modified_base 14: mod_base = OTHER; note = 2'-deoxy-2'-fluoroadenosine-3'-phosphate
  modified_base 15: mod_base = OTHER; note = 2'-O-methylcytidine-3'-phosphate
  modified_base 16: mod_base = OTHER; note = 2'-O-methyluridine-3'-phosphate
  modified_base 17: mod_base = OTHER; note = 2'-O-methyladenosine-3'-phosphate
  modified_base 18: mod_base = OTHER; note = 2'-O-methyladenosine-3'-phosphate
  modified_base 19: mod_base = OTHER; note = 2'-O-methylcytidine-3'-phosphate
  modified_base 20: mod_base = OTHER; note = 2'-O-methyladenosine-3'-phosphate
  modified_base 21: mod_base = OTHER; note = 2'-O-methyluridine-3'-phosphorothioate
  modified_base 22: mod_base = OTHER; note = 2'-O-methylcytidine-3'-phosphorothioate
  modified_base 23: mod_base = OTHER; note = 2'-O-methyluridine
  misc_feature 1: note = RNA
  misc_feature 3..4: note = RNA
  misc_feature 6: note = RNA
  misc_feature 8..11: note = RNA
  misc_feature 13..23: note = RNA
  misc_feature 2: note = DNA
  misc_feature 5: note = DNA
  misc_feature 7: note = DNA
  misc_feature 12: note = DNA
taaggcttattctactaacatct

SEQ ID NO: 1662 - DNA, 23 bp, synthetic construct
  source 1..23: mol_type = other DNA
  modified_base 1: mod_base = OTHER; note = 2'-O-methyluridine-3'-phosphorothioate
  modified_base 2: mod_base = OTHER; note = 2'-deoxythymidine-3'-phosphorothioate
  modified_base 3: mod_base = OTHER; note = 2'-O-methyluridine-3'-phosphate
  modified_base 4: mod_base = OTHER; note = 2'-O-methyladenosine-3'-phosphate
  modified_base 6: mod_base = OTHER; note = 2'-O-methyluridine-3'-phosphate
  modified_base 8: mod_base = OTHER; note = 2'-O-methyladenosine-3'-phosphate
  modified_base 9: mod_base = OTHER; note = 2'-O-methylguanosine-3'-phosphate
  modified_base 10: mod_base = OTHER; note = 2'-O-methylguanosine-3'-phosphate
  modified_base 11: mod_base = OTHER; note = 2'-O-methyluridine-3'-phosphate
  modified_base 13: mod_base = OTHER; note = 2'-O-methyladenosine-3'-phosphate
  modified_base 14: mod_base = OTHER; note = 2'-deoxy-2'-fluoroadenosine-3'-phosphate
  modified_base 15: mod_base = OTHER; note = 2'-O-methyladenosine-3'-phosphate
  modified_base 16: mod_base = OTHER; note = 2'-O-methyladenosine-3'-phosphate
  modified_base 17: mod_base = OTHER; note = 2'-O-methyladenosine-3'-phosphate
  modified_base 18: mod_base = OTHER; note = 2'-O-methylguanosine-3'-phosphate
  modified_base 19: mod_base = OTHER; note = 2'-O-methylguanosine-3'-phosphate
  modified_base 20: mod_base = OTHER; note = 2'-O-methyluridine-3'-phosphate
  modified_base 21: mod_base = OTHER; note = 2'-O-methylguanosine-3'-phosphorothioate
  modified_base 22: mod_base = OTHER; note = 2'-O-methyluridine-3'-phosphorothioate
  modified_base 23: mod_base = OTHER; note = 2'-O-methyluridine
  misc_feature 1: note = RNA
  misc_feature 3..4: note = RNA
  misc_feature 6: note = RNA
  misc_feature 8..11: note = RNA
  misc_feature 13..23: note = RNA
  misc_feature 2: note = DNA
  misc_feature 5: note = DNA
  misc_feature 7: note = DNA
  misc_feature 12: note = DNA
tttagttaggtgaaaaaggtgtt

SEQ ID NO: 1663 - DNA, 23 bp, synthetic construct
  source 1..23: mol_type = other DNA
  modified_base 1: mod_base = OTHER; note = 2'-O-methyluridine-3'-phosphorothioate
  modified_base 2: mod_base = OTHER; note = 2'-deoxyguanosine-3'-phosphorothioate
  modified_base 3: mod_base = OTHER; note = 2'-O-methyluridine-3'-phosphate
  modified_base 4: mod_base = OTHER; note = 2'-O-methylcytidine-3'-phosphate
  modified_base 6: mod_base = OTHER; note = 2'-O-methyluridine-3'-phosphate
  modified_base 8: mod_base = OTHER; note = 2'-O-methylcytidine-3'-phosphate
  modified_base 9: mod_base = OTHER; note = 2'-O-methyladenosine-3'-phosphate
  modified_base 10: mod_base = OTHER; note = 2'-O-methyluridine-3'-phosphate
  modified_base 11: mod_base = OTHER; note = 2'-O-methyluridine-3'-phosphate
  modified_base 13: mod_base = OTHER; note = 2'-O-methylcytidine-3'-phosphate
  modified_base 14: mod_base = OTHER; note = 2'-deoxy-2'-fluorouridine-3'-phosphate
  modified_base 15: mod_base = OTHER; note = 2'-O-methyluridine-3'-phosphate
  modified_base 16: mod_base = OTHER; note = 2'-O-methylcytidine-3'-phosphate
  modified_base 17: mod_base = OTHER; note = 2'-O-methyladenosine-3'-phosphate
  modified_base 18: mod_base = OTHER; note = 2'-O-methylcytidine-3'-phosphate
  modified_base 19: mod_base = OTHER; note = 2'-O-methyluridine-3'-phosphate
  modified_base 20: mod_base = OTHER; note = 2'-O-methylcytidine-3'-phosphate
  modified_base 21: mod_base = OTHER; note = 2'-O-methyladenosine-3'-phosphorothioate
  modified_base 22: mod_base = OTHER; note = 2'-O-methylguanosine-3'-phosphorothioate
  modified_base 23: mod_base = OTHER; note = 2'-O-methyluridine
  misc_feature 1: note = RNA
  misc_feature 3..4: note = RNA
  misc_feature 6: note = RNA
  misc_feature 8..11: note = RNA
  misc_feature 13..23: note = RNA
  misc_feature 2: note = DNA
  misc_feature 5: note = DNA
  misc_feature 7: note = DNA
  misc_feature 12: note = DNA
tgtctttcatttcttcactcagt

SEQ ID NO: 1664 - DNA, 23 bp, synthetic construct
  source 1..23: mol_type = other DNA
  modified_base 1: mod_base = OTHER; note = 2'-O-methyluridine-3'-phosphorothioate
  modified_base 2: mod_base = OTHER; note = 2'-deoxyadenosine-3'-phosphorothioate
  modified_base 3: mod_base = OTHER; note = 2'-O-methyladenosine-3'-phosphate
  modified_base 4: mod_base = OTHER; note = 2'-O-methyladenosine-3'-phosphate
  modified_base 6: mod_base = OTHER; note = 2'-O-methyladenosine-3'-phosphate
  modified_base 8: mod_base = OTHER; note = 2'-O-methyluridine-3'-phosphate
  modified_base 9: mod_base = OTHER; note = 2'-O-methyladenosine-3'-phosphate
  modified_base 10: mod_base = OTHER; note = 2'-O-methyluridine-3'-phosphate
  modified_base 11: mod_base = OTHER; note = 2'-O-methyluridine-3'-phosphate
  modified_base 13: mod_base = OTHER; note = 2'-O-methyluridine-3'-phosphate
  modified_base 14: mod_base = OTHER; note = 2'-deoxy-2'-fluoroadenosine-3'-phosphate
  modified_base 15: mod_base = OTHER; note = 2'-O-methylguanosine-3'-phosphate
  modified_base 16: mod_base = OTHER; note = 2'-O-methyluridine-3'-phosphate
  modified_base 17: mod_base = OTHER; note = 2'-O-methyluridine-3'-phosphate
  modified_base 18: mod_base = OTHER; note = 2'-O-methyladenosine-3'-phosphate
  modified_base 19: mod_base = OTHER; note = 2'-O-methylguanosine-3'-phosphate
  modified_base 20: mod_base = OTHER; note = 2'-O-methylguanosine-3'-phosphate
  modified_base 21: mod_base = OTHER; note = 2'-O-methyluridine-3'-phosphorothioate
  modified_base 22: mod_base = OTHER; note = 2'-O-methylguanosine-3'-phosphorothioate
  modified_base 23: mod_base = OTHER; note = 2'-O-methyladenosine
  misc_feature 1: note = RNA
  misc_feature 3..4: note = RNA
  misc_feature 6: note = RNA
  misc_feature 8..11: note = RNA
  misc_feature 13..23: note = RNA
  misc_feature 2: note = DNA
  misc_feature 5: note = DNA
  misc_feature 7: note = DNA
  misc_feature 12: note = DNA
taaacattattttagttaggtga

SEQ ID NO: 1665 - DNA, 23 bp, synthetic construct
  source 1..23: mol_type = other DNA
  modified_base 1: mod_base = OTHER; note = 2'-O-methyluridine-3'-phosphorothioate
  modified_base 2: mod_base = OTHER; note = 2'-deoxythymidine-3'-phosphorothioate
  modified_base 3: mod_base = OTHER; note = 2'-O-methyladenosine-3'-phosphate
  modified_base 4: mod_base = OTHER; note = 2'-O-methyluridine-3'-phosphate
  modified_base 6: mod_base = OTHER; note = 2'-O-methyluridine-3'-phosphate
  modified_base 8: mod_base = OTHER; note = 2'-O-methyladenosine-3'-phosphate
  modified_base 9: mod_base = OTHER; note = 2'-O-methylguanosine-3'-phosphate
  modified_base 10: mod_base = OTHER; note = 2'-O-methyluridine-3'-phosphate
  modified_base 11: mod_base = OTHER; note = 2'-O-methyluridine-3'-phosphate
  modified_base 13: mod_base = OTHER; note = 2'-O-methylguanosine-3'-phosphate
  modified_base 14: mod_base = OTHER; note = 2'-deoxy-2'-fluoroguanosine-3'-phosphate
  modified_base 15: mod_base = OTHER; note = 2'-O-methyluridine-3'-phosphate
  modified_base 16: mod_base = OTHER; note = 2'-O-methylguanosine-3'-phosphate
  modified_base 17: mod_base = OTHER; note = 2'-O-methyladenosine-3'-phosphate
  modified_base 18: mod_base = OTHER; note = 2'-O-methyladenosine-3'-phosphate
  modified_base 19: mod_base = OTHER; note = 2'-O-methyladenosine-3'-phosphate
  modified_base 20: mod_base = OTHER; note = 2'-O-methyladenosine-3'-phosphate
  modified_base 21: mod_base = OTHER; note = 2'-O-methyladenosine-3'-phosphorothioate
  modified_base 22: mod_base = OTHER; note = 2'-O-methylguanosine-3'-phosphorothioate
  modified_base 23: mod_base = OTHER; note = 2'-O-methylguanosine
  misc_feature 1: note = RNA
  misc_feature 3..4: note = RNA
  misc_feature 6: note = RNA
  misc_feature 8..11: note = RNA
  misc_feature 13..23: note = RNA
  misc_feature 2: note = DNA
  misc_feature 5: note = DNA
  misc_feature 7: note = DNA
  misc_feature 12: note = DNA
ttattttagttaggtgaaaaagg

SEQ ID NO: 1666 - DNA, 23 bp, synthetic construct
  source 1..23: mol_type = other DNA
  modified_base 1: mod_base = OTHER; note = 2'-O-methyladenosine-3'-phosphorothioate
  modified_base 2: mod_base = OTHER; note = 2'-deoxythymidine-3'-phosphorothioate
  modified_base 3: mod_base = OTHER; note = 2'-O-methylguanosine-3'-phosphate
  modified_base 4: mod_base = OTHER; note = 2'-O-methylguanosine-3'-phosphate
  modified_base 6: mod_base = OTHER; note = 2'-O-methyluridine-3'-phosphate
  modified_base 8: mod_base = OTHER; note = 2'-O-methylguanosine-3'-phosphate
  modified_base 9: mod_base = OTHER; note = 2'-O-methylcytidine-3'-phosphate
  modified_base 10: mod_base = OTHER; note = 2'-O-methyladenosine-3'-phosphate
  modified_base 11: mod_base = OTHER; note = 2'-O-methyladenosine-3'-phosphate
  modified_base 13: mod_base = OTHER; note = 2'-O-methyluridine-3'-phosphate
  modified_base 14: mod_base = OTHER; note = 2'-deoxy-2'-fluorouridine-3'-phosphate
  modified_base 15: mod_base = OTHER; note = 2'-O-methylguanosine-3'-phosphate
  modified_base 16: mod_base = OTHER; note = 2'-O-methylcytidine-3'-phosphate
  modified_base 17: mod_base = OTHER; note = 2'-O-methyladenosine-3'-phosphate
  modified_base 18: mod_base = OTHER; note = 2'-O-methyladenosine-3'-phosphate
  modified_base 19: mod_base = OTHER; note = 2'-O-methyladenosine-3'-phosphate
  modified_base 20: mod_base = OTHER; note = 2'-O-methyluridine-3'-phosphate
  modified_base 21: mod_base = OTHER; note = 2'-O-methylcytidine-3'-phosphorothioate
  modified_base 22: mod_base = OTHER; note = 2'-O-methyluridine-3'-phosphorothioate
  modified_base 23: mod_base = OTHER; note = 2'-O-methyluridine
  misc_feature 1: note = RNA
  misc_feature 3..4: note = RNA
  misc_feature 6: note = RNA
  misc_feature 8..11: note = RNA
  misc_feature 13..23: note = RNA
  misc_feature 2: note = DNA
  misc_feature 5: note = DNA
  misc_feature 7: note = DNA
  misc_feature 12: note = DNA
atgggtagcaagttgcaaatctt

SEQ ID NO: 1667 - DNA, 23 bp, synthetic construct
  source 1..23: mol_type = other DNA
  modified_base 1: mod_base = OTHER; note = 2'-O-methyladenosine-3'-phosphorothioate
  modified_base 2: mod_base = OTHER; note = 2'-deoxyadenosine-3'-phosphorothioate
  modified_base 3: mod_base = OTHER; note = 2'-O-methylguanosine-3'-phosphate
  modified_base 4: mod_base = OTHER; note = 2'-O-methylcytidine-3'-phosphate
  modified_base 6: mod_base = OTHER; note = 2'-O-methyluridine-3'-phosphate
  modified_base 8: mod_base = OTHER; note = 2'-O-methyladenosine-3'-phosphate
  modified_base 9: mod_base = OTHER; note = 2'-O-methylcytidine-3'-phosphate
  modified_base 10: mod_base = OTHER; note = 2'-O-methyladenosine-3'-phosphate
  modified_base 11: mod_base = OTHER; note = 2'-O-methyluridine-3'-phosphate
  modified_base 13: mod_base = OTHER; note = 2'-O-methyladenosine-3'-phosphate
  modified_base 14: mod_base = OTHER; note = 2'-deoxy-2'-fluoroguanosine-3'-phosphate
  modified_base 15: mod_base = OTHER; note = 2'-O-methyladenosine-3'-phosphate
  modified_base 16: mod_base = OTHER; note = 2'-O-methylcytidine-3'-phosphate
  modified_base 17: mod_base = OTHER; note = 2'-O-methyladenosine-3'-phosphate
  modified_base 18: mod_base = OTHER; note = 2'-O-methyluridine-3'-phosphate
  modified_base 19: mod_base = OTHER; note = 2'-O-methyluridine-3'-phosphate
  modified_base 20: mod_base = OTHER; note = 2'-O-methyladenosine-3'-phosphate
  modified_base 21: mod_base = OTHER; note = 2'-O-methyluridine-3'-phosphorothioate
  modified_base 22: mod_base = OTHER; note = 2'-O-methylcytidine-3'-phosphorothioate
  modified_base 23: mod_base = OTHER; note = 2'-O-methylcytidine
  misc_feature 1: note = RNA
  misc_feature 3..4: note = RNA
  misc_feature 6: note = RNA
  misc_feature 8..11: note = RNA
  misc_feature 13..23: note = RNA
  misc_feature 2: note = DNA
  misc_feature 5: note = DNA
  misc_feature 7: note = DNA
  misc_feature 12: note = DNA
aagcattacataagacattatcc

SEQ ID NO: 1668 - DNA, 23 bp, synthetic construct
  source 1..23: mol_type = other DNA
  modified_base 1: mod_base = OTHER; note = 2'-O-methyluridine-3'-phosphorothioate
  modified_base 2: mod_base = OTHER; note = 2'-deoxyadenosine-3'-phosphorothioate
  modified_base 3: mod_base = OTHER; note = 2'-O-methyluridine-3'-phosphate
  modified_base 4: mod_base = OTHER; note = 2'-O-methylcytidine-3'-phosphate
  modified_base 6: mod_base = OTHER; note = 2'-O-methyluridine-3'-phosphate
  modified_base 8: mod_base = OTHER; note = 2'-O-methyladenosine-3'-phosphate
  modified_base 9: mod_base = OTHER; note = 2'-O-methyluridine-3'-phosphate
  modified_base 10: mod_base = OTHER; note = 2'-O-methylguanosine-3'-phosphate
  modified_base 11: mod_base = OTHER; note = 2'-O-methylguanosine-3'-phosphate
  modified_base 13: mod_base = OTHER; note = 2'-O-methyluridine-3'-phosphate
  modified_base 14: mod_base = OTHER; note = 2'-deoxy-2'-fluoroadenosine-3'-phosphate
  modified_base 15: mod_base = OTHER; note = 2'-O-methylguanosine-3'-phosphate
  modified_base 16: mod_base = OTHER; note = 2'-O-methylcytidine-3'-phosphate
  modified_base 17: mod_base = OTHER; note = 2'-O-methyladenosine-3'-phosphate
  modified_base 18: mod_base = OTHER; note = 2'-O-methyladenosine-3'-phosphate
  modified_base 19: mod_base = OTHER; note = 2'-O-methylguanosine-3'-phosphate
  modified_base 20: mod_base = OTHER; note = 2'-O-methyluridine-3'-phosphate
  modified_base 21: mod_base = OTHER; note = 2'-O-methyluridine-3'-phosphorothioate
  modified_base 22: mod_base = OTHER; note = 2'-O-methylguanosine-3'-phosphorothioate
  modified_base 23: mod_base = OTHER; note = 2'-O-methylcytidine
  misc_feature 1: note = RNA
  misc_feature 3..4: note = RNA
  misc_feature 6: note = RNA
  misc_feature 8..11: note = RNA
  misc_feature 13..23: note = RNA
  misc_feature 2: note = DNA
  misc_feature 5: note = DNA
  misc_feature 7: note = DNA
  misc_feature 12: note = DNA
tatcctaatgggtagcaagttgc

SEQ ID NO: 1669 - DNA, 23 bp, synthetic construct
  source 1..23: mol_type = other DNA
  modified_base 1: mod_base = OTHER; note = 2'-O-methyladenosine-3'-phosphorothioate
  modified_base 2: mod_base = OTHER; note = 2'-deoxythymidine-3'-phosphorothioate
  modified_base 3: mod_base = OTHER; note = 2'-O-methyluridine-3'-phosphate
  modified_base 4: mod_base = OTHER; note = 2'-O-methyluridine-3'-phosphate
  modified_base 6: mod_base = OTHER; note = 2'-O-methylcytidine-3'-phosphate
  modified_base 8: mod_base = OTHER; note = 2'-O-methyluridine-3'-phosphate
  modified_base 9: mod_base = OTHER; note = 2'-O-methyladenosine-3'-phosphate
  modified_base 10: mod_base = OTHER; note = 2'-O-methyladenosine-3'-phosphate
  modified_base 11: mod_base = OTHER; note = 2'-O-methyladenosine-3'-phosphate
  modified_base 13: mod_base = OTHER; note = 2'-O-methylcytidine-3'-phosphate
  modified_base 14: mod_base = OTHER; note = 2'-deoxy-2'-fluorocytidine-3'-phosphate
  modified_base 15: mod_base = OTHER; note = 2'-O-methyladenosine-3'-phosphate
  modified_base 16: mod_base = OTHER; note = 2'-O-methyladenosine-3'-phosphate
  modified_base 17: mod_base = OTHER; note = 2'-O-methylcytidine-3'-phosphate
  modified_base 18: mod_base = OTHER; note = 2'-O-methyluridine-3'-phosphate
  modified_base 19: mod_base = OTHER; note = 2'-O-methylcytidine-3'-phosphate
  modified_base 20: mod_base = OTHER; note = 2'-O-methyladenosine-3'-phosphate
  modified_base 21: mod_base = OTHER; note = 2'-O-methylguanosine-3'-phosphorothioate
  modified_base 22: mod_base = OTHER; note = 2'-O-methylcytidine-3'-phosphorothioate
  modified_base 23: mod_base = OTHER; note = 2'-O-methyluridine
  misc_feature 1: note = RNA
  misc_feature 3..4: note = RNA
  misc_feature 6: note = RNA
  misc_feature 8..11: note = RNA
  misc_feature 13..23: note = RNA
  misc_feature 2: note = DNA
  misc_feature 5: note = DNA
  misc_feature 7: note = DNA
  misc_feature 12: note = DNA
attttcataaaaccaactcagct

SEQ ID NO: 1670 - DNA, 23 bp, synthetic construct
  source 1..23: mol_type = other DNA
  modified_base 1: mod_base = OTHER; note = 2'-O-methyladenosine-3'-phosphorothioate
  modified_base 2: mod_base = OTHER; note = 2'-deoxythymidine-3'-phosphorothioate
  modified_base 3: mod_base = OTHER; note = 2'-O-methyladenosine-3'-phosphate
  modified_base 4: mod_base = OTHER; note = 2'-O-methyladenosine-3'-phosphate
  modified_base 6: mod_base = OTHER; note = 2'-O-methyladenosine-3'-phosphate
  modified_base 8: mod_base = OTHER; note = 2'-O-methyladenosine-3'-phosphate
  modified_base 9: mod_base = OTHER; note = 2'-O-methyladenosine-3'-phosphate
  modified_base 10: mod_base = OTHER; note = 2'-O-methyladenosine-3'-phosphate
  modified_base 11: mod_base = OTHER; note = 2'-O-methyladenosine-3'-phosphate
  modified_base 13: mod_base = OTHER; note = 2'-O-methyluridine-3'-phosphate
  modified_base 14: mod_base = OTHER; note = 2'-deoxy-2'-fluorocytidine-3'-phosphate
  modified_base 15: mod_base = OTHER; note = 2'-O-methyladenosine-3'-phosphate
  modified_base 16: mod_base = OTHER; note = 2'-O-methyladenosine-3'-phosphate
  modified_base 17: mod_base = OTHER; note = 2'-O-methylcytidine-3'-phosphate
  modified_base 18: mod_base = OTHER; note = 2'-O-methyladenosine-3'-phosphate
  modified_base 19: mod_base = OTHER; note = 2'-O-methylguanosine-3'-phosphate
  modified_base 20: mod_base = OTHER; note = 2'-O-methylguanosine-3'-phosphate
  modified_base 21: mod_base = OTHER; note = 2'-O-methyluridine-3'-phosphorothioate
  modified_base 22: mod_base = OTHER; note = 2'-O-methyladenosine-3'-phosphorothioate
  modified_base 23: mod_base = OTHER; note = 2'-O-methyladenosine
  misc_feature 1: note = RNA
  misc_feature 3..4: note = RNA
  misc_feature 6: note = RNA
  misc_feature 8..11: note = RNA
  misc_feature 13..23: note = RNA
  misc_feature 2: note = DNA
  misc_feature 5: note = DNA
  misc_feature 7: note = DNA
  misc_feature 12: note = DNA
ataatacaaaattcaacaggtaa

SEQ ID NO: 1671 - DNA, 23 bp, synthetic construct
  source 1..23: mol_type = other DNA
  modified_base 1: mod_base = OTHER; note = 2'-O-methyladenosine-3'-phosphorothioate
  modified_base 2: mod_base = OTHER; note = 2'-deoxyguanosine-3'-phosphorothioate
  modified_base 3: mod_base = OTHER; note = 2'-O-methyluridine-3'-phosphate
  modified_base 4: mod_base = OTHER; note = 2'-O-methylguanosine-3'-phosphate
  modified_base 6: mod_base = OTHER; note = 2'-O-methyladenosine-3'-phosphate
  modified_base 8: mod_base = OTHER; note = 2'-O-methyladenosine-3'-phosphate
  modified_base 9: mod_base = OTHER; note = 2'-O-methyladenosine-3'-phosphate
  modified_base 10: mod_base = OTHER; note = 2'-O-methylguanosine-3'-phosphate
  modified_base 11: mod_base = OTHER; note = 2'-O-methylguanosine-3'-phosphate
  modified_base 13: mod_base = OTHER; note = 2'-O-methylguanosine-3'-phosphate
  modified_base 14: mod_base = OTHER; note = 2'-deoxy-2'-fluorouridine-3'-phosphate
  modified_base 15: mod_base = OTHER; note = 2'-O-methyluridine-3'-phosphate
  modified_base 16: mod_base = OTHER; note = 2'-O-methylcytidine-3'-phosphate
  modified_base 17: mod_base = OTHER; note = 2'-O-methyluridine-3'-phosphate
  modified_base 18: mod_base = OTHER; note = 2'-O-methyladenosine-3'-phosphate
  modified_base 19: mod_base = OTHER; note = 2'-O-methyladenosine-3'-phosphate
  modified_base 20: mod_base = OTHER; note = 2'-O-methyladenosine-3'-phosphate
  modified_base 21: mod_base = OTHER; note = 2'-O-methyladenosine-3'-phosphorothioate
  modified_base 22: mod_base = OTHER; note = 2'-O-methyluridine-3'-phosphorothioate
  modified_base 23: mod_base = OTHER; note = 2'-O-methyluridine
  misc_feature 1: note = RNA
  misc_feature 3..4: note = RNA
  misc_feature 6: note = RNA
  misc_feature 8..11: note = RNA
  misc_feature 13..23: note = RNA
  misc_feature 2: note = DNA
  misc_feature 5: note = DNA
  misc_feature 7: note = DNA
  misc_feature 12: note = DNA
agtgaaaaaggtgttctaaaatt

SEQ ID NO: 1672 - DNA, 23 bp, synthetic construct
  source 1..23: mol_type = other DNA
  modified_base 1: mod_base = OTHER; note = 2'-O-methyluridine-3'-phosphorothioate
  modified_base 2: mod_base = OTHER; note = 2'-deoxythymidine-3'-phosphorothioate
  modified_base 3: mod_base = OTHER; note = 2'-O-methylguanosine-3'-phosphate
  modified_base 4: mod_base = OTHER; note = 2'-O-methylcytidine-3'-phosphate
  modified_base 6: mod_base = OTHER; note = 2'-O-methyladenosine-3'-phosphate
  modified_base 8: mod_base = OTHER; note = 2'-O-methyluridine-3'-phosphate
  modified_base 9: mod_base = OTHER; note = 2'-O-methylcytidine-3'-phosphate
  modified_base 10: mod_base = OTHER; note = 2'-O-methyluridine-3'-phosphate
  modified_base 11: mod_base = OTHER; note = 2'-O-methyluridine-3'-phosphate
  modified_base 13: mod_base = OTHER; note = 2'-O-methylcytidine-3'-phosphate
  modified_base 14: mod_base = OTHER; note = 2'-deoxy-2'-fluorouridine-3'-phosphate
  modified_base 15: mod_base = OTHER; note = 2'-O-methylcytidine-3'-phosphate
  modified_base 16: mod_base = OTHER; note = 2'-O-methyladenosine-3'-phosphate
  modified_base 17: mod_base = OTHER; note = 2'-O-methyluridine-3'-phosphate
  modified_base 18: mod_base = OTHER; note = 2'-O-methylguanosine-3'-phosphate
  modified_base 19: mod_base = OTHER; note = 2'-O-methyluridine-3'-phosphate
  modified_base 20: mod_base = OTHER; note = 2'-O-methyladenosine-3'-phosphate
  modified_base 21: mod_base = OTHER; note = 2'-O-methyluridine-3'-phosphorothioate
  modified_base 22: mod_base = OTHER; note = 2'-O-methylcytidine-3'-phosphorothioate
  modified_base 23: mod_base = OTHER; note = 2'-O-methylcytidine
  misc_feature 1: note = RNA
  misc_feature 3..4: note = RNA
  misc_feature 6: note = RNA
  misc_feature 8..11: note = RNA
  misc_feature 13..23: note = RNA
  misc_feature 2: note = DNA
  misc_feature 5: note = DNA
  misc_feature 7: note = DNA
  misc_feature 12: note = DNA
ttgcaaatcttgctcatgtatcc

SEQ ID NO: 1673 - DNA, 23 bp, synthetic construct
  source 1..23: mol_type = other DNA
  modified_base 1: mod_base = OTHER; note = 2'-O-methyladenosine-3'-phosphorothioate
  modified_base 2: mod_base = OTHER; note = 2'-deoxythymidine-3'-phosphorothioate
  modified_base 3: mod_base = OTHER; note = 2'-O-methyladenosine-3'-phosphate
  modified_base 4: mod_base = OTHER; note = 2'-O-methyladenosine-3'-phosphate
  modified_base 6: mod_base = OTHER; note = 2'-O-methyladenosine-3'-phosphate
  modified_base 8: mod_base = OTHER; note = 2'-O-methylcytidine-3'-phosphate
  modified_base 9: mod_base = OTHER; note = 2'-O-methyladenosine-3'-phosphate
  modified_base 10: mod_base = OTHER; note = 2'-O-methyladenosine-3'-phosphate
  modified_base 11: mod_base = OTHER; note = 2'-O-methylcytidine-3'-phosphate
  modified_base 13: mod_base = OTHER; note = 2'-O-methylcytidine-3'-phosphate
  modified_base 14: mod_base = OTHER; note = 2'-deoxy-2'-fluoroadenosine-3'-phosphate
  modified_base 15: mod_base = OTHER; note = 2'-O-methylguanosine-3'-phosphate
  modified_base 16: mod_base = OTHER; note = 2'-O-methylcytidine-3'-phosphate
  modified_base 17: mod_base = OTHER; note = 2'-O-methyluridine-3'-phosphate
  modified_base 18: mod_base = OTHER; note = 2'-O-methylcytidine-3'-phosphate
  modified_base 19: mod_base = OTHER; note = 2'-O-methyladenosine-3'-phosphate
  modified_base 20: mod_base = OTHER; note = 2'-O-methylguanosine-3'-phosphate
  modified_base 21: mod_base = OTHER; note = 2'-O-methyladenosine-3'-phosphorothioate
  modified_base 22: mod_base = OTHER; note = 2'-O-methylguanosine-3'-phosphorothioate
  modified_base 23: mod_base = OTHER; note = 2'-O-methylguanosine
  misc_feature 1: note = RNA
  misc_feature 3..4: note = RNA
  misc_feature 6: note = RNA
  misc_feature 8..11: note = RNA
  misc_feature 13..23: note = RNA
  misc_feature 2: note = DNA
  misc_feature 5: note = DNA
  misc_feature 7: note = DNA
  misc_feature 12: note = DNA
ataaaaccaactcagctcagagg

SEQ ID NO: 1674 - DNA, 23 bp, synthetic construct
  source 1..23: mol_type = other DNA
  modified_base 1: mod_base = OTHER; note = 2'-O-methyluridine-3'-phosphorothioate
  modified_base 2: mod_base = OTHER; note = 2'-deoxythymidine-3'-phosphorothioate
  modified_base 3: mod_base = OTHER; note = 2'-O-methyluridine-3'-phosphate
  modified_base 4: mod_base = OTHER; note = 2'-O-methyluridine-3'-phosphate
  modified_base 6: mod_base = OTHER; note = 2'-O-methyladenosine-3'-phosphate
  modified_base 8: mod_base = OTHER; note = 2'-O-methyladenosine-3'-phosphate
  modified_base 9: mod_base = OTHER; note = 2'-O-methyladenosine-3'-phosphate
  modified_base 10: mod_base = OTHER; note = 2'-O-methyladenosine-3'-phosphate
  modified_base 11: mod_base = OTHER; note = 2'-O-methyladenosine-3'-phosphate
  modified_base 13: mod_base = OTHER; note = 2'-O-methylcytidine-3'-phosphate
  modified_base 14: mod_base = OTHER; note = 2'-deoxy-2'-fluoroadenosine-3'-phosphate
  modified_base 15: mod_base = OTHER; note = 2'-O-methyladenosine-3'-phosphate
  modified_base 16: mod_base = OTHER; note = 2'-O-methylcytidine-3'-phosphate
  modified_base 17: mod_base = OTHER; note = 2'-O-methyluridine-3'-phosphate
  modified_base 18: mod_base = OTHER; note = 2'-O-methylcytidine-3'-phosphate
  modified_base 19: mod_base = OTHER; note = 2'-O-methyladenosine-3'-phosphate
  modified_base 20: mod_base = OTHER; note = 2'-O-methylguanosine-3'-phosphate
  modified_base 21: mod_base = OTHER; note = 2'-O-methylcytidine-3'-phosphorothioate
  modified_base 22: mod_base = OTHER; note = 2'-O-methyluridine-3'-phosphorothioate
  modified_base 23: mod_base = OTHER; note = 2'-O-methylcytidine
  misc_feature 1: note = RNA
  misc_feature 3..4: note = RNA
  misc_feature 6: note = RNA
  misc_feature 8..11: note = RNA
  misc_feature 13..23: note = RNA
  misc_feature 2: note = DNA
  misc_feature 5: note = DNA
  misc_feature 7: note = DNA
  misc_feature 12: note = DNA
ttttcataaaaccaactcagctc

SEQ ID NO: 1675 - DNA, 23 bp, synthetic construct
  source 1..23: mol_type = other DNA
  modified_base 1: mod_base = OTHER; note = 2'-O-methyluridine-3'-phosphorothioate
  modified_base 2: mod_base = OTHER; note = 2'-deoxyadenosine-3'-phosphorothioate
  modified_base 3: mod_base = OTHER; note = 2'-O-methyladenosine-3'-phosphate
  modified_base 4: mod_base = OTHER; note = 2'-O-methylguanosine-3'-phosphate
  modified_base 6: mod_base = OTHER; note = 2'-O-methyladenosine-3'-phosphate
  modified_base 8: mod_base = OTHER; note = 2'-O-methylguanosine-3'-phosphate
  modified_base 9: mod_base = OTHER; note = 2'-O-methylguanosine-3'-phosphate
  modified_base 10: mod_base = OTHER; note = 2'-O-methyladenosine-3'-phosphate
  modified_base 11: mod_base = OTHER; note = 2'-O-methylguanosine-3'-phosphate
  modified_base 13: mod_base = OTHER; note = 2'-O-methylguanosine-3'-phosphate
  modified_base 14: mod_base = OTHER; note = 2'-deoxy-2'-fluoroadenosine-3'-phosphate
  modified_base 15: mod_base = OTHER; note = 2'-O-methyluridine-3'-phosphate
  modified_base 16: mod_base = OTHER; note = 2'-O-methyladenosine-3'-phosphate
  modified_base 17: mod_base = OTHER; note = 2'-O-methyladenosine-3'-phosphate
  modified_base 18: mod_base = OTHER; note = 2'-O-methylguanosine-3'-phosphate
  modified_base 19: mod_base = OTHER; note = 2'-O-methylguanosine-3'-phosphate
  modified_base 20: mod_base = OTHER; note = 2'-O-methylcytidine-3'-phosphate
  modified_base 21: mod_base = OTHER; note = 2'-O-methylcytidine-3'-phosphorothioate
  modified_base 22: mod_base = OTHER; note = 2'-O-methyladenosine-3'-phosphorothioate
  modified_base 23: mod_base = OTHER; note = 2'-O-methylcytidine
  misc_feature 1: note = RNA
  misc_feature 3..4: note = RNA
  misc_feature 6: note = RNA
  misc_feature 8..11: note = RNA
  misc_feature 13..23: note = RNA
  misc_feature 2: note = DNA
  misc_feature 5: note = DNA
  misc_feature 7: note = DNA
  misc_feature 12: note = DNA
taaggaaggagggataaggccac

SEQ ID NO: 1676 - DNA, 23 bp, synthetic construct
  source 1..23: mol_type = other DNA
  modified_base 1: mod_base = OTHER; note = 2'-O-methyladenosine-3'-phosphorothioate
  modified_base 2: mod_base = OTHER; note = 2'-deoxythymidine-3'-phosphorothioate
  modified_base 3: mod_base = OTHER; note = 2'-O-methyluridine-3'-phosphate
  modified_base 4: mod_base = OTHER; note = 2'-O-methyladenosine-3'-phosphate
  modified_base 6: mod_base = OTHER; note = 2'-O-methyluridine-3'-phosphate
  modified_base 8: mod_base = OTHER; note = 2'-O-methyladenosine-3'-phosphate
  modified_base 9: mod_base = OTHER; note = 2'-O-methylguanosine-3'-phosphate
  modified_base 10: mod_base = OTHER; note = 2'-O-methylguanosine-3'-phosphate
  modified_base 11: mod_base = OTHER; note = 2'-O-methyluridine-3'-phosphate
  modified_base 13: mod_base = OTHER; note = 2'-O-methyladenosine-3'-phosphate
  modified_base 14: mod_base = OTHER; note = 2'-deoxy-2'-fluoroadenosine-3'-phosphate
  modified_base 15: mod_base = OTHER; note = 2'-O-methyladenosine-3'-phosphate
  modified_base 16: mod_base = OTHER; note = 2'-O-methyladenosine-3'-phosphate
  modified_base 17: mod_base = OTHER; note = 2'-O-methyladenosine-3'-phosphate
  modified_base 18: mod_base = OTHER; note = 2'-O-methylguanosine-3'-phosphate
  modified_base 19: mod_base = OTHER; note = 2'-O-methylguanosine-3'-phosphate
  modified_base 20: mod_base = OTHER; note = 2'-O-methyluridine-3'-phosphate
  modified_base 21: mod_base = OTHER; note = 2'-O-methylguanosine-3'-phosphorothioate
  modified_base 22: mod_base = OTHER; note = 2'-O-methyluridine-3'-phosphorothioate
  modified_base 23: mod_base = OTHER; note = 2'-O-methyluridine
  misc_feature 1: note = RNA
  misc_feature 3..4: note = RNA
  misc_feature 6: note = RNA
  misc_feature 8..11: note = RNA
  misc_feature 13..23: note = RNA
  misc_feature 2: note = DNA
  misc_feature 5: note = DNA
  misc_feature 7: note = DNA
  misc_feature 12: note = DNA
attagttaggtgaaaaaggtgtt

SEQ ID NO: 1677 - DNA, 23 bp, synthetic construct
  source 1..23: mol_type = other DNA
  modified_base 1: mod_base = OTHER; note = 2'-O-methyluridine-3'-phosphorothioate
  modified_base 2: mod_base = OTHER; note = 2'-deoxyadenosine-3'-phosphorothioate
  modified_base 3: mod_base = OTHER; note = 2'-O-methyladenosine-3'-phosphate
  modified_base 4: mod_base = OTHER; note = 2'-O-methyladenosine-3'-phosphate
  modified_base 6: mod_base = OTHER; note = 2'-O-methylcytidine-3'-phosphate
  modified_base 8: mod_base = OTHER; note = 2'-O-methyluridine-3'-phosphate
  modified_base 9: mod_base = OTHER; note = 2'-O-methylguanosine-3'-phosphate
  modified_base 10: mod_base = OTHER; note = 2'-O-methylcytidine-3'-phosphate
  modified_base 11: mod_base = OTHER; note = 2'-O-methyluridine-3'-phosphate
  modified_base 13: mod_base = OTHER; note = 2'-O-methyladenosine-3'-phosphate
  modified_base 14: mod_base = OTHER; note = 2'-deoxy-2'-fluorouridine-3'-phosphate
  modified_base 15: mod_base = OTHER; note = 2'-O-methylguanosine-3'-phosphate
  modified_base 16: mod_base = OTHER; note = 2'-O-methyluridine-3'-phosphate
  modified_base 17: mod_base = OTHER; note = 2'-O-methyladenosine-3'-phosphate
  modified_base 18: mod_base = OTHER; note = 2'-O-methyluridine-3'-phosphate
  modified_base 19: mod_base = OTHER; note = 2'-O-methylcytidine-3'-phosphate
  modified_base 20: mod_base = OTHER; note = 2'-O-methylcytidine-3'-phosphate
  modified_base 21: mod_base = OTHER; note = 2'-O-methyladenosine-3'-phosphorothioate
  modified_base 22: mod_base = OTHER; note = 2'-O-methylcytidine-3'-phosphorothioate
  modified_base 23: mod_base = OTHER; note = 2'-O-methylcytidine
  misc_feature 1: note = RNA
  misc_feature 3..4: note = RNA
  misc_feature 6: note = RNA
  misc_feature 8..11: note = RNA
  misc_feature 13..23: note = RNA
  misc_feature 2: note = DNA
  misc_feature 5: note = DNA
  misc_feature 7: note = DNA
  misc_feature 12: note = DNA
taaatcttgctcatgtatccacc

SEQ ID NO: 1678 - DNA, 23 bp, synthetic construct
  source 1..23: mol_type = other DNA
  modified_base 1: mod_base = OTHER; note = 2'-O-methyluridine-3'-phosphorothioate
  modified_base 2: mod_base = OTHER; note = 2'-deoxyadenosine-3'-phosphorothioate
  modified_base 3: mod_base = OTHER; note = 2'-O-methyladenosine-3'-phosphate
  modified_base 4: mod_base = OTHER; note = 2'-O-methylcytidine-3'-phosphate
  modified_base 6: mod_base = OTHER; note = 2'-O-methylguanosine-3'-phosphate
  modified_base 8: mod_base = OTHER; note = 2'-O-methylcytidine-3'-phosphate
  modified_base 9: mod_base = OTHER; note = 2'-O-methyluridine-3'-phosphate
  modified_base 10: mod_base = OTHER; note = 2'-O-methylguanosine-3'-phosphate
  modified_base 11: mod_base = OTHER; note = 2'-O-methyladenosine-3'-phosphate
  modified_base 13: mod_base = OTHER; note = 2'-O-methylcytidine-3'-phosphate
  modified_base 14: mod_base = OTHER; note = 2'-deoxy-2'-fluoroadenosine-3'-phosphate
  modified_base 15: mod_base = OTHER; note = 2'-O-methyluridine-3'-phosphate
  modified_base 16: mod_base = OTHER; note = 2'-O-methyluridine-3'-phosphate
  modified_base 17: mod_base = OTHER; note = 2'-O-methyladenosine-3'-phosphate
  modified_base 18: mod_base = OTHER; note = 2'-O-methyladenosine-3'-phosphate
  modified_base 19: mod_base = OTHER; note = 2'-O-methyluridine-3'-phosphate
  modified_base 20: mod_base = OTHER; note = 2'-O-methyladenosine-3'-phosphate
  modified_base 21: mod_base = OTHER; note = 2'-O-methylguanosine-3'-phosphorothioate
  modified_base 22: mod_base = OTHER; note = 2'-O-methylguanosine-3'-phosphorothioate
  modified_base 23: mod_base = OTHER; note = 2'-O-methylguanosine
  misc_feature 1: note = RNA
  misc_feature 3..4: note = RNA
  misc_feature 6: note = RNA
  misc_feature 8..11: note = RNA
  misc_feature 13..23: note = RNA
  misc_feature 2: note = DNA
  misc_feature 5: note = DNA
  misc_feature 7: note = DNA
  misc_feature 12: note = DNA
taacagtctgaccattaataggg

SEQ ID NO: 1679 - DNA, 23 bp, synthetic construct
  source 1..23: mol_type = other DNA
  modified_base 1: mod_base = OTHER; note = 2'-O-methyluridine-3'-phosphorothioate
  modified_base 2: mod_base = OTHER; note = 2'-deoxyadenosine-3'-phosphorothioate
  modified_base 3: mod_base = OTHER; note = 2'-O-methyladenosine-3'-phosphate
  modified_base 4: mod_base = OTHER; note = 2'-O-methylguanosine-3'-phosphate
  modified_base 6: mod_base = OTHER; note = 2'-O-methyluridine-3'-phosphate
  modified_base 8: mod_base = OTHER; note = 2'-O-methylguanosine-3'-phosphate
  modified_base 9: mod_base = OTHER; note = 2'-O-methyladenosine-3'-phosphate
  modified_base 10: mod_base = OTHER; note = 2'-O-methylguanosine-3'-phosphate
  modified_base 11: mod_base = OTHER; note = 2'-O-methylguanosine-3'-phosphate
  modified_base 13: mod_base = OTHER; note = 2'-O-methyluridine-3'-phosphate
  modified_base 14: mod_base = OTHER; note = 2'-deoxy-2'-fluorocytidine-3'-phosphate
  modified_base 15: mod_base = OTHER; note = 2'-O-methylcytidine-3'-phosphate
  modified_base 16: mod_base = OTHER; note = 2'-O-methylcytidine-3'-phosphate
  modified_base 17: mod_base = OTHER; note = 2'-O-methyluridine-3'-phosphate
  modified_base 18: mod_base = OTHER; note = 2'-O-methylguanosine-3'-phosphate
  modified_base 19: mod_base = OTHER; note = 2'-O-methyluridine-3'-phosphate
  modified_base 20: mod_base = OTHER; note = 2'-O-methylguanosine-3'-phosphate
  modified_base 21: mod_base = OTHER; note = 2'-O-methylcytidine-3'-phosphorothioate
  modified_base 22: mod_base = OTHER; note = 2'-O-methyladenosine-3'-phosphorothioate
  modified_base 23: mod_base = OTHER; note = 2'-O-methylguanosine
  misc_feature 1: note = RNA
  misc_feature 3..4: note = RNA
  misc_feature 6: note = RNA
  misc_feature 8..11: note = RNA
  misc_feature 13..23: note = RNA
  misc_feature 2: note = DNA
  misc_feature 5: note = DNA
  misc_feature 7: note = DNA
  misc_feature 12: note = DNA
taaggtagaggttccctgtgcag

SEQ ID NO: 1680 - DNA, 23 bp, synthetic construct
  source 1..23: mol_type = other DNA
  modified_base 1: mod_base = OTHER; note = 2'-O-methyluridine-3'-phosphorothioate
  modified_base 2: mod_base = OTHER; note = 2'-deoxythymidine-3'-phosphorothioate
  modified_base 3: mod_base = OTHER; note = 2'-O-methyladenosine-3'-phosphate
  modified_base 4: mod_base = OTHER; note = 2'-O-methylcytidine-3'-phosphate
  modified_base 6: mod_base = OTHER; note = 2'-O-methylguanosine-3'-phosphate
  modified_base 8: mod_base = OTHER; note = 2'-O-methylguanosine-3'-phosphate
  modified_base 9: mod_base = OTHER; note = 2'-O-methylcytidine-3'-phosphate
  modified_base 10: mod_base = OTHER; note = 2'-O-methyladenosine-3'-phosphate
  modified_base 11: mod_base = OTHER; note = 2'-O-methylguanosine-3'-phosphate
  modified_base 13: mod_base = OTHER; note = 2'-O-methyladenosine-3'-phosphate
  modified_base 14: mod_base = OTHER; note = 2'-deoxy-2'-fluorouridine-3'-phosphate
  modified_base 15: mod_base = OTHER; note = 2'-O-methyluridine-3'-phosphate
  modified_base 16: mod_base = OTHER; note = 2'-O-methyladenosine-3'-phosphate
  modified_base 17: mod_base = OTHER; note = 2'-O-methylcytidine-3'-phosphate
  modified_base 18: mod_base = OTHER; note = 2'-O-methyladenosine-3'-phosphate
  modified_base 19: mod_base = OTHER; note = 2'-O-methyluridine-3'-phosphate
  modified_base 20: mod_base = OTHER; note = 2'-O-methyladenosine-3'-phosphate
  modified_base 21: mod_base = OTHER; note = 2'-O-methyladenosine-3'-phosphorothioate
  modified_base 22: mod_base = OTHER; note = 2'-O-methylguanosine-3'-phosphorothioate
  modified_base 23: mod_base = OTHER; note = 2'-O-methyladenosine
  misc_feature 1: note = RNA
  misc_feature 3..4: note = RNA
  misc_feature 6: note = RNA
  misc_feature 8..11: note = RNA
  misc_feature 13..23: note = RNA
  misc_feature 2: note = DNA
  misc_feature 5: note = DNA
  misc_feature 7: note = DNA
  misc_feature 12: note = DNA
ttacagggcagcattacataaga

SEQ ID NO: 1681 - DNA, 23 bp, synthetic construct
  source 1..23: mol_type = other DNA
  modified_base 1: mod_base = OTHER; note = 2'-O-methyluridine-3'-phosphorothioate
  modified_base 2: mod_base = OTHER; note = 2'-deoxyadenosine-3'-phosphorothioate
  modified_base 3: mod_base = OTHER; note = 2'-O-methyladenosine-3'-phosphate
  modified_base 4: mod_base = OTHER; note = 2'-O-methylguanosine-3'-phosphate
  modified_base 6: mod_base = OTHER; note = 2'-O-methylguanosine-3'-phosphate
  modified_base 8: mod_base = OTHER; note = 2'-O-methyladenosine-3'-phosphate
  modified_base 9: mod_base = OTHER; note = 2'-O-methylcytidine-3'-phosphate
  modified_base 10: mod_base = OTHER; note = 2'-O-methylguanosine-3'-phosphate
  modified_base 11: mod_base = OTHER; note = 2'-O-methyluridine-3'-phosphate
  modified_base 13: mod_base = OTHER; note = 2'-O-methylguanosine-3'-phosphate
  modified_base 14: mod_base = OTHER; note = 2'-deoxy-2'-fluorouridine-3'-phosphate
  modified_base 15: mod_base = OTHER; note = 2'-O-methylcytidine-3'-phosphate
  modified_base 16: mod_base = OTHER; note = 2'-O-methyladenosine-3'-phosphate
  modified_base 17: mod_base = OTHER; note = 2'-O-methylcytidine-3'-phosphate
  modified_base 18: mod_base = OTHER; note = 2'-O-methyluridine-3'-phosphate
  modified_base 19: mod_base = OTHER; note = 2'-O-methylcytidine-3'-phosphate
  modified_base 20: mod_base = OTHER; note = 2'-O-methyladenosine-3'-phosphate
  modified_base 21: mod_base = OTHER; note = 2'-O-methylcytidine-3'-phosphorothioate
  modified_base 22: mod_base = OTHER; note = 2'-O-methyluridine-3'-phosphorothioate
  modified_base 23: mod_base = OTHER; note = 2'-O-methylcytidine
  misc_feature 1: note = RNA
  misc_feature 3..4: note = RNA
  misc_feature 6: note = RNA
  misc_feature 8..11: note = RNA
  misc_feature 13..23: note = RNA
  misc_feature 2: note = DNA
  misc_feature 5: note = DNA
  misc_feature 7: note = DNA
  misc_feature 12: note = DNA
taagggtacgttgtcactcactc

SEQ ID NO: 1682 - DNA, 23 bp, synthetic construct
  source 1..23: mol_type = other DNA
  modified_base 1: mod_base = OTHER; note = 2'-O-methyladenosine-3'-phosphorothioate
  modified_base 2: mod_base = OTHER; note = 2'-deoxyadenosine-3'-phosphorothioate
  modified_base 3: mod_base = OTHER; note = 2'-O-methyladenosine-3'-phosphate
  modified_base 4: mod_base = OTHER; note = 2'-O-methylguanosine-3'-phosphate
  modified_base 6: mod_base = OTHER; note = 2'-O-methyluridine-3'-phosphate
  modified_base 8: mod_base = OTHER; note = 2'-O-methylguanosine-3'-phosphate
  modified_base 9: mod_base = OTHER; note = 2'-O-methylguanosine-3'-phosphate
  modified_base 10: mod_base = OTHER; note = 2'-O-methyladenosine-3'-phosphate
  modified_base 11: mod_base = OTHER; note = 2'-O-methyladenosine-3'-phosphate
  modified_base 13: mod_base = OTHER; note = 2'-O-methylcytidine-3'-phosphate
  modified_base 14: mod_base = OTHER; note = 2'-deoxy-2'-fluorouridine-3'-phosphate
  modified_base 15: mod_base = OTHER; note = 2'-O-methyluridine-3'-phosphate
  modified_base 16: mod_base = OTHER; note = 2'-O-methyluridine-3'-phosphate
  modified_base 17: mod_base = OTHER; note = 2'-O-methyladenosine-3'-phosphate
  modified_base 18: mod_base = OTHER; note = 2'-O-methylguanosine-3'-phosphate
  modified_base 19: mod_base = OTHER; note = 2'-O-methylcytidine-3'-phosphate
  modified_base 20: mod_base = OTHER; note = 2'-O-methyladenosine-3'-phosphate
  modified_base 21: mod_base = OTHER; note = 2'-O-methylcytidine-3'-phosphorothioate
  modified_base 22: mod_base = OTHER; note = 2'-O-methylcytidine-3'-phosphorothioate
  modified_base 23: mod_base = OTHER; note = 2'-O-methyluridine
  misc_feature 1: note = RNA
  misc_feature 3..4: note = RNA
  misc_feature 6: note = RNA
  misc_feature 8..11: note = RNA
  misc_feature 13..23: note = RNA
  misc_feature 2: note = DNA
  misc_feature 5: note = DNA
  misc_feature 7: note = DNA
  misc_feature 12: note = DNA
aaagatgggaaactttagcacct

SEQ ID NO: 1683 - DNA, 23 bp, synthetic construct
  source 1..23: mol_type = other DNA
  modified_base 1: mod_base = OTHER; note = 2'-O-methyluridine-3'-phosphorothioate
  modified_base 2: mod_base = OTHER; note = 2'-deoxyadenosine-3'-phosphorothioate
  modified_base 3: mod_base = OTHER; note = 2'-O-methyladenosine-3'-phosphate
  modified_base 4: mod_base = OTHER; note = 2'-O-methyluridine-3'-phosphate
  modified_base 6: mod_base = OTHER; note = 2'-O-methylcytidine-3'-phosphate
  modified_base 8: mod_base = OTHER; note = 2'-O-methyladenosine-3'-phosphate
  modified_base 9: mod_base = OTHER; note = 2'-O-methyladenosine-3'-phosphate
  modified_base 10: mod_base = OTHER; note = 2'-O-methyladenosine-3'-phosphate
  modified_base 11: mod_base = OTHER; note = 2'-O-methyluridine-3'-phosphate
  modified_base 13: mod_base = OTHER; note = 2'-O-methylcytidine-3'-phosphate
  modified_base 14: mod_base = OTHER; note = 2'-deoxy-2'-fluoroadenosine-3'-phosphate
  modified_base 15: mod_base = OTHER; note = 2'-O-methyladenosine-3'-phosphate
  modified_base 16: mod_base = OTHER; note = 2'-O-methylcytidine-3'-phosphate
  modified_base 17: mod_base = OTHER; note = 2'-O-methyladenosine-3'-phosphate
  modified_base 18: mod_base = OTHER; note = 2'-O-methylguanosine-3'-phosphate
  modified_base 19: mod_base = OTHER; note = 2'-O-methylguanosine-3'-phosphate
  modified_base 20: mod_base = OTHER; note = 2'-O-methyluridine-3'-phosphate
  modified_base 21: mod_base = OTHER; note = 2'-O-methyladenosine-3'-phosphorothioate
  modified_base 22: mod_base = OTHER; note = 2'-O-methyladenosine-3'-phosphorothioate
  modified_base 23: mod_base = OTHER; note = 2'-O-methylcytidine
  misc_feature 1: note = RNA
  misc_feature 3..4: note = RNA
  misc_feature 6: note = RNA
  misc_feature 8..11: note = RNA
  misc_feature 13..23: note = RNA
  misc_feature 2: note = DNA
  misc_feature 5: note = DNA
  misc_feature 7: note = DNA
  misc_feature 12: note = DNA
taatacaaaattcaacaggtaac

SEQ ID NO: 1684 - DNA, 23 bp, synthetic construct
  source 1..23: mol_type = other DNA
  modified_base 1: mod_base = OTHER; note = 2'-O-methyladenosine-3'-phosphorothioate
  modified_base 2: mod_base = OTHER; note = 2'-deoxyguanosine-3'-phosphorothioate
  modified_base 3: mod_base = OTHER; note = 2'-O-methyladenosine-3'-phosphate
  modified_base 4: mod_base = OTHER; note = 2'-O-methyluridine-3'-phosphate
  modified_base 6: mod_base = OTHER; note = 2'-O-methyladenosine-3'-phosphate
  modified_base 8: mod_base = OTHER; note = 2'-O-methylcytidine-3'-phosphate
  modified_base 9: mod_base = OTHER; note = 2'-O-methyladenosine-3'-phosphate
  modified_base 10: mod_base = OTHER; note = 2'-O-methyluridine-3'-phosphate
  modified_base 11: mod_base = OTHER; note = 2'-O-methylcytidine-3'-phosphate
  modified_base 13: mod_base = OTHER; note = 2'-O-methyluridine-3'-phosphate
  modified_base 14: mod_base = OTHER; note = 2'-deoxy-2'-fluoroguanosine-3'-phosphate
  modified_base 15: mod_base = OTHER; note = 2'-O-methyluridine-3'-phosphate
  modified_base 16: mod_base = OTHER; note = 2'-O-methyluridine-3'-phosphate
  modified_base 17: mod_base = OTHER; note = 2'-O-methyladenosine-3'-phosphate
  modified_base 18: mod_base = OTHER; note = 2'-O-methylcytidine-3'-phosphate
  modified_base 19: mod_base = OTHER; note = 2'-O-methylcytidine-3'-phosphate
  modified_base 20: mod_base = OTHER; note = 2'-O-methylcytidine-3'-phosphate
  modified_base 21: mod_base = OTHER; note = 2'-O-methylcytidine-3'-phosphorothioate
  modified_base 22: mod_base = OTHER; note = 2'-O-methylcytidine-3'-phosphorothioate
  modified_base 23: mod_base = OTHER; note = 2'-O-methylguanosine
  misc_feature 1: note = RNA
  misc_feature 3..4: note = RNA
  misc_feature 6: note = RNA
  misc_feature 8..11: note = RNA
  misc_feature 13..23: note = RNA
  misc_feature 2: note = DNA
  misc_feature 5: note = DNA
  misc_feature 7: note = DNA
  misc_feature 12: note = DNA
agattatcatcttgttacccccg

SEQ ID NO: 1685 - DNA, 23 bp, synthetic construct
  source 1..23: mol_type = other DNA
  modified_base 1: mod_base = OTHER; note = 2'-O-methyluridine-3'-phosphorothioate
  modified_base 2: mod_base = OTHER; note = 2'-deoxythymidine-3'-phosphorothioate
  modified_base 3: mod_base = OTHER; note = 2'-O-methylguanosine-3'-phosphate
  modified_base 4: mod_base = OTHER; note = 2'-O-methyladenosine-3'-phosphate
  modified_base 6: mod_base = OTHER; note = 2'-O-methyluridine-3'-phosphate
  modified_base 8: mod_base = OTHER; note = 2'-O-methyluridine-3'-phosphate
  modified_base 9: mod_base = OTHER; note = 2'-O-methyladenosine-3'-phosphate
  modified_base 10: mod_base = OTHER; note = 2'-O-methylguanosine-3'-phosphate
  modified_base 11: mod_base = OTHER; note = 2'-O-methylguanosine-3'-phosphate
  modified_base 13: mod_base = OTHER; note = 2'-O-methylcytidine-3'-phosphate
  modified_base 14: mod_base = OTHER; note = 2'-deoxy-2'-fluoroadenosine-3'-phosphate
  modified_base 15: mod_base = OTHER; note = 2'-O-methylguanosine-3'-phosphate
  modified_base 16: mod_base = OTHER; note = 2'-O-methyladenosine-3'-phosphate
  modified_base 17: mod_base = OTHER; note = 2'-O-methyluridine-3'-phosphate
  modified_base 18: mod_base = OTHER; note = 2'-O-methylguanosine-3'-phosphate
  modified_base 19: mod_base = OTHER; note = 2'-O-methyluridine-3'-phosphate
  modified_base 20: mod_base = OTHER; note = 2'-O-methylcytidine-3'-phosphate
  modified_base 21: mod_base = OTHER; note = 2'-O-methylguanosine-3'-phosphorothioate
  modified_base 22: mod_base = OTHER; note = 2'-O-methyluridine-3'-phosphorothioate
  modified_base 23: mod_base = OTHER; note = 2'-O-methyladenosine
  misc_feature 1: note = RNA
  misc_feature 3..4: note = RNA
  misc_feature 6: note = RNA
  misc_feature 8..11: note = RNA
  misc_feature 13..23: note = RNA
  misc_feature 2: note = DNA
  misc_feature 5: note = DNA
  misc_feature 7: note = DNA
  misc_feature 12: note = DNA
ttgactttagggcagatgtcgta

SEQ ID NO: 1686 - DNA, 23 bp, synthetic construct
  source 1..23: mol_type = other DNA
  modified_base 1: mod_base = OTHER; note = 2'-O-methyluridine-3'-phosphorothioate
  modified_base 2: mod_base = OTHER; note = 2'-deoxyadenosine-3'-phosphorothioate
  modified_base 3: mod_base = OTHER; note = 2'-O-methyluridine-3'-phosphate
  modified_base 4: mod_base = OTHER; note = 2'-O-methylcytidine-3'-phosphate
  modified_base 6: mod_base = OTHER; note = 2'-O-methylguanosine-3'-phosphate
  modified_base 8: mod_base = OTHER; note = 2'-O-methyladenosine-3'-phosphate
  modified_base 9: mod_base = OTHER; note = 2'-O-methyladenosine-3'-phosphate
  modified_base 10: mod_base = OTHER; note = 2'-O-methylguanosine-3'-phosphate
  modified_base 11: mod_base = OTHER; note = 2'-O-methylcytidine-3'-phosphate
  modified_base 13: mod_base = OTHER; note = 2'-O-methyladenosine-3'-phosphate
  modified_base 14: mod_base = OTHER; note = 2'-deoxy-2'-fluorouridine-3'-phosphate
  modified_base 15: mod_base = OTHER; note = 2'-O-methylguanosine-3'-phosphate
  modified_base 16: mod_base = OTHER; note = 2'-O-methyluridine-3'-phosphate
  modified_base 17: mod_base = OTHER; note = 2'-O-methylcytidine-3'-phosphate
  modified_base 18: mod_base = OTHER; note = 2'-O-methyladenosine-3'-phosphate
  modified_base 19: mod_base = OTHER; note = 2'-O-methylcytidine-3'-phosphate
  modified_base 20: mod_base = OTHER; note = 2'-O-methylcytidine-3'-phosphate
  modified_base 21: mod_base = OTHER; note = 2'-O-methyladenosine-3'-phosphorothioate
  modified_base 22: mod_base = OTHER; note = 2'-O-methylguanosine-3'-phosphorothioate
  modified_base 23: mod_base = OTHER; note = 2'-O-methyluridine
  misc_feature 1: note = RNA
  misc_feature 3..4: note = RNA
  misc_feature 6: note = RNA
  misc_feature 8..11: note = RNA
  misc_feature 13..23: note = RNA
  misc_feature 2: note = DNA
  misc_feature 5: note = DNA
  misc_feature 7: note = DNA
  misc_feature 12: note = DNA
tatctggaagccatgtcaccagt

SEQ ID NO: 1687 - DNA, 23 bp, synthetic construct
  source 1..23: mol_type = other DNA
  modified_base 1: mod_base = OTHER; note = 2'-O-methyluridine-3'-phosphorothioate
  modified_base 2: mod_base = OTHER; note = 2'-deoxyadenosine-3'-phosphorothioate
  modified_base 3: mod_base = OTHER; note = 2'-O-methyluridine-3'-phosphate
  modified_base 4: mod_base = OTHER; note = 2'-O-methyluridine-3'-phosphate
  modified_base 6: mod_base = OTHER; note = 2'-O-methyluridine-3'-phosphate
  modified_base 8: mod_base = OTHER; note = 2'-O-methylcytidine-3'-phosphate
  modified_base 9: mod_base = OTHER; note = 2'-O-methyluridine-3'-phosphate
  modified_base 10: mod_base = OTHER; note = 2'-O-methyladenosine-3'-phosphate
  modified_base 11: mod_base = OTHER; note = 2'-O-methyladenosine-3'-phosphate
  modified_base 13: mod_base = OTHER; note = 2'-O-methylguanosine-3'-phosphate
  modified_base 14: mod_base = OTHER; note = 2'-deoxy-2'-fluoroguanosine-3'-phosphate
  modified_base 15: mod_base = OTHER; note = 2'-O-methylguanosine-3'-phosphate
  modified_base 16: mod_base = OTHER; note = 2'-O-methyluridine-3'-phosphate
  modified_base 17: mod_base = OTHER; note = 2'-O-methyladenosine-3'-phosphate
  modified_base 18: mod_base = OTHER; note = 2'-O-methylguanosine-3'-phosphate
  modified_base 19: mod_base = OTHER; note = 2'-O-methylcytidine-3'-phosphate
  modified_base 20: mod_base = OTHER; note = 2'-O-methyladenosine-3'-phosphate
  modified_base 21: mod_base = OTHER; note = 2'-O-methyladenosine-3'-phosphorothioate
  modified_base 22: mod_base = OTHER; note = 2'-O-methylguanosine-3'-phosphorothioate
  modified_base 23: mod_base = OTHER; note = 2'-O-methyluridine
  misc_feature 1: note = RNA
  misc_feature 3..4: note = RNA
  misc_feature 6: note = RNA
  misc_feature 8..11: note = RNA
  misc_feature 13..23: note = RNA
  misc_feature 2: note = DNA
  misc_feature 5: note = DNA
  misc_feature 7: note = DNA
  misc_feature 12: note = DNA
tattatcctaatgggtagcaagt

SEQ ID NO: 1688 - DNA, 23 bp, synthetic construct
  source 1..23: mol_type = other DNA
  modified_base 1: mod_base = OTHER; note = 2'-O-methyladenosine-3'-phosphorothioate
  modified_base 2: mod_base = OTHER; note = 2'-deoxyadenosine-3'-phosphorothioate
  modified_base 3: mod_base = OTHER; note = 2'-O-methylguanosine-3'-phosphate
  modified_base 4: mod_base = OTHER; note = 2'-O-methyluridine-3'-phosphate
  modified_base 6: mod_base = OTHER; note = 2'-O-methylguanosine-3'-phosphate
  modified_base 8: mod_base = OTHER; note = 2'-O-methyladenosine-3'-phosphate
  modified_base 9: mod_base = OTHER; note = 2'-O-methyladenosine-3'-phosphate
  modified_base 10: mod_base = OTHER; note = 2'-O-methyladenosine-3'-phosphate
  modified_base 11: mod_base = OTHER; note = 2'-O-methyluridine-3'-phosphate
  modified_base 13: mod_base = OTHER; note = 2'-O-methyluridine-3'-phosphate
  modified_base 14: mod_base = OTHER; note = 2'-deoxy-2'-fluorouridine-3'-phosphate
  modified_base 15: mod_base = OTHER; note = 2'-O-methylguanosine-3'-phosphate
  modified_base 16: mod_base = OTHER; note = 2'-O-methylcytidine-3'-phosphate
  modified_base 17: mod_base = OTHER; note = 2'-O-methyluridine-3'-phosphate
  modified_base 18: mod_base = OTHER; note = 2'-O-methylcytidine-3'-phosphate
  modified_base 19: mod_base = OTHER; note = 2'-O-methyladenosine-3'-phosphate
  modified_base 20: mod_base = OTHER; note = 2'-O-methyluridine-3'-phosphate
  modified_base 21: mod_base = OTHER; note = 2'-O-methylguanosine-3'-phosphorothioate
  modified_base 22: mod_base = OTHER; note = 2'-O-methyluridine-3'-phosphorothioate
  modified_base 23: mod_base = OTHER; note = 2'-O-methyladenosine
  misc_feature 1: note = RNA
  misc_feature 3..4: note = RNA
  misc_feature 6: note = RNA
  misc_feature 8..11: note = RNA
  misc_feature 13..23: note = RNA
  misc_feature 2: note = DNA
  misc_feature 5: note = DNA
  misc_feature 7: note = DNA
  misc_feature 12: note = DNA
aagttgcaaatcttgctcatgta

SEQ ID NO: 1689 - DNA, 23 bp, synthetic construct
  source 1..23: mol_type = other DNA
  modified_base 1: mod_base = OTHER; note = 2'-O-methyladenosine-3'-phosphorothioate
  modified_base 2: mod_base = OTHER; note = 2'-deoxythymidine-3'-phosphorothioate
  modified_base 3: mod_base = OTHER; note = 2'-O-methylcytidine-3'-phosphate
  modified_base 4: mod_base = OTHER; note = 2'-O-methylcytidine-3'-phosphate
  modified_base 6: mod_base = OTHER; note = 2'-O-methylcytidine-3'-phosphate
  modified_base 8: mod_base = OTHER; note = 2'-O-methyluridine-3'-phosphate
  modified_base 9: mod_base = OTHER; note = 2'-O-methyluridine-3'-phosphate
  modified_base 10: mod_base = OTHER; note = 2'-O-methyluridine-3'-phosphate
  modified_base 11: mod_base = OTHER; note = 2'-O-methylguanosine-3'-phosphate
  modified_base 13: mod_base = OTHER; note = 2'-O-methylcytidine-3'-phosphate
  modified_base 14: mod_base = OTHER; note = 2'-deoxy-2'-fluorouridine-3'-phosphate
  modified_base 15: mod_base = OTHER; note = 2'-O-methyluridine-3'-phosphate
  modified_base 16: mod_base = OTHER; note = 2'-O-methyluridine-3'-phosphate
  modified_base 17: mod_base = OTHER; note = 2'-O-methylcytidine-3'-phosphate
  modified_base 18: mod_base = OTHER; note = 2'-O-methyladenosine-3'-phosphate
  modified_base 19: mod_base = OTHER; note = 2'-O-methyluridine-3'-phosphate
  modified_base 20: mod_base = OTHER; note = 2'-O-methyluridine-3'-phosphate
  modified_base 21: mod_base = OTHER; note = 2'-O-methyluridine-3'-phosphorothioate
  modified_base 22: mod_base = OTHER; note = 2'-O-methylcytidine-3'-phosphorothioate
  modified_base 23: mod_base = OTHER; note = 2'-O-methyluridine
  misc_feature 1: note = RNA
  misc_feature 3..4: note = RNA
  misc_feature 6: note = RNA
  misc_feature 8..11: note = RNA
  misc_feature 13..23: note = RNA
  misc_feature 2: note = DNA
  misc_feature 5: note = DNA
  misc_feature 7: note = DNA
  misc_feature 12: note = DNA
atccacctttgtctttcatttct

SEQ ID NO: 1690 - DNA, 23 bp, synthetic construct
  source 1..23: mol_type = other DNA
  modified_base 1: mod_base = OTHER; note = 2'-O-methyluridine-3'-phosphorothioate
  modified_base 2: mod_base = OTHER; note = 2'-deoxythymidine-3'-phosphorothioate
  modified_base 3: mod_base = OTHER; note = 2'-O-methylcytidine-3'-phosphate
  modified_base 4: mod_base = OTHER; note = 2'-O-methylguanosine-3'-phosphate
  modified_base 6: mod_base = OTHER; note = 2'-O-methyladenosine-3'-phosphate
  modified_base 8: mod_base = OTHER; note = 2'-O-methylguanosine-3'-phosphate
  modified_base 9: mod_base = OTHER; note = 2'-O-methylcytidine-3'-phosphate
  modified_base 10: mod_base = OTHER; note = 2'-O-methyladenosine-3'-phosphate
  modified_base 11: mod_base = OTHER; note = 2'-O-methyluridine-3'-phosphate
  modified_base 13: mod_base = OTHER; note = 2'-O-methyluridine-3'-phosphate
  modified_base 14: mod_base = OTHER; note = 2'-deoxy-2'-fluorocytidine-3'-phosphate
  modified_base 15: mod_base = OTHER; note = 2'-O-methyluridine-3'-phosphate
  modified_base 16: mod_base = OTHER; note = 2'-O-methylcytidine-3'-phosphate
  modified_base 17: mod_base = OTHER; note = 2'-O-methyluridine-3'-phosphate
  modified_base 18: mod_base = OTHER; note = 2'-O-methylcytidine-3'-phosphate
  modified_base 19: mod_base = OTHER; note = 2'-O-methylcytidine-3'-phosphate
  modified_base 20: mod_base = OTHER; note = 2'-O-methylcytidine-3'-phosphate
  modified_base 21: mod_base = OTHER; note = 2'-O-methyladenosine-3'-phosphorothioate
  modified_base 22: mod_base = OTHER; note = 2'-O-methylguanosine-3'-phosphorothioate
  modified_base 23: mod_base = OTHER; note = 2'-O-methylcytidine
  misc_feature 1: note = RNA
  misc_feature 3..4: note = RNA
  misc_feature 6: note = RNA
  misc_feature 8..11: note = RNA
  misc_feature 13..23: note = RNA
  misc_feature 2: note = DNA
  misc_feature 5: note = DNA
  misc_feature 7: note = DNA
  misc_feature 12: note = DNA
ttcgaaggcatatctctcccagc

SEQ ID NO: 1691 - DNA, 23 bp, synthetic construct
  source 1..23: mol_type = other DNA
  modified_base 1: mod_base = OTHER; note = 2'-O-methyluridine-3'-phosphorothioate
  modified_base 2: mod_base = OTHER; note = 2'-deoxythymidine-3'-phosphorothioate
  modified_base 3: mod_base = OTHER; note = 2'-O-methyluridine-3'-phosphate
  modified_base 4: mod_base = OTHER; note = 2'-O-methylguanosine-3'-phosphate
  modified_base 6: mod_base = OTHER; note = 2'-O-methyluridine-3'-phosphate
  modified_base 8: mod_base = OTHER; note = 2'-O-methylcytidine-3'-phosphate
  modified_base 9: mod_base = OTHER; note = 2'-O-methylcytidine-3'-phosphate
  modified_base 10: mod_base = OTHER; note = 2'-O-methylcytidine-3'-phosphate
  modified_base 11: mod_base = OTHER; note = 2'-O-methylcytidine-3'-phosphate
  modified_base 13: mod_base = OTHER; note = 2'-O-methylguanosine-3'-phosphate
  modified_base 14: mod_base = OTHER; note = 2'-deoxy-2'-fluorocytidine-3'-phosphate
  modified_base 15: mod_base = OTHER; note = 2'-O-methylcytidine-3'-phosphate
  modified_base 16: mod_base = OTHER; note = 2'-O-methyladenosine-3'-phosphate
  modified_base 17: mod_base = OTHER; note = 2'-O-methyluridine-3'-phosphate
  modified_base 18: mod_base = OTHER; note = 2'-O-methylguanosine-3'-phosphate
  modified_base 19: mod_base = OTHER; note = 2'-O-methylguanosine-3'-phosphate
  modified_base 20: mod_base = OTHER; note = 2'-O-methyladenosine-3'-phosphate
  modified_base 21: mod_base = OTHER; note = 2'-O-methylguanosine-3'-phosphorothioate
  modified_base 22: mod_base = OTHER; note = 2'-O-methyladenosine-3'-phosphorothioate
  modified_base 23: mod_base = OTHER; note = 2'-O-methylcytidine
  misc_feature 1: note = RNA
  misc_feature 3..4: note = RNA
  misc_feature 6: note = RNA
  misc_feature 8..11: note = RNA
  misc_feature 13..23: note = RNA
  misc_feature 2: note = DNA
  misc_feature 5: note = DNA
  misc_feature 7: note = DNA
  misc_feature 12: note = DNA
tttgttacccccgccatggagac

SEQ ID NO: 1692 - DNA, 23 bp, synthetic construct
  source 1..23: mol_type = other DNA
  modified_base 1: mod_base = OTHER; note = 2'-O-methyladenosine-3'-phosphorothioate
  modified_base 2: mod_base = OTHER; note = 2'-deoxycytidine-3'-phosphorothioate
  modified_base 3: mod_base = OTHER; note = 2'-O-methyladenosine-3'-phosphate
  modified_base 4: mod_base = OTHER; note = 2'-O-methyluridine-3'-phosphate
  modified_base 6: mod_base = OTHER; note = 2'-O-methylcytidine-3'-phosphate
  modified_base 8: mod_base = OTHER; note = 2'-O-methyladenosine-3'-phosphate
  modified_base 9: mod_base = OTHER; note = 2'-O-methyladenosine-3'-phosphate
  modified_base 10: mod_base = OTHER; note = 2'-O-methylguanosine-3'-phosphate
  modified_base 11: mod_base = OTHER; note = 2'-O-methyladenosine-3'-phosphate
  modified_base 13: mod_base = OTHER; note = 2'-O-methylcytidine-3'-phosphate
  modified_base 14: mod_base = OTHER; note = 2'-deoxy-2'-fluorocytidine-3'-phosphate
  modified_base 15: mod_base = OTHER; note = 2'-O-methyluridine-3'-phosphate
  modified_base 16: mod_base = OTHER; note = 2'-O-methylcytidine-3'-phosphate
  modified_base 17: mod_base = OTHER; note = 2'-O-methyladenosine-3'-phosphate
  modified_base 18: mod_base = OTHER; note = 2'-O-methyluridine-3'-phosphate
  modified_base 19: mod_base = OTHER; note = 2'-O-methylguanosine-3'-phosphate
  modified_base 20: mod_base = OTHER; note = 2'-O-methylcytidine-3'-phosphate
  modified_base 21: mod_base = OTHER; note = 2'-O-methyluridine-3'-phosphorothioate
  modified_base 22: mod_base = OTHER; note = 2'-O-methylguanosine-3'-phosphorothioate
  modified_base 23: mod_base = OTHER; note = 2'-O-methylguanosine
  misc_feature 1: note = RNA
  misc_feature 3..4: note = RNA
  misc_feature 6: note = RNA
  misc_feature 8..11: note = RNA
  misc_feature 13..23: note = RNA
  misc_feature 2: note = DNA
  misc_feature 5: note = DNA
  misc_feature 7: note = DNA
  misc_feature 12: note = DNA
acattctaagaacctcatgctgg

SEQ ID NO: 1693 - DNA, 23 bp, synthetic construct
  source 1..23: mol_type = other DNA
  modified_base 1: mod_base = OTHER; note = 2'-O-methyladenosine-3'-phosphorothioate
  modified_base 2: mod_base = OTHER; note = 2'-deoxycytidine-3'-phosphorothioate
  modified_base 3: mod_base = OTHER; note = 2'-O-methyladenosine-3'-phosphate
  modified_base 4: mod_base = OTHER; note = 2'-O-methylguanosine-3'-phosphate
  modified_base 6: mod_base = OTHER; note = 2'-O-methylcytidine-3'-phosphate
  modified_base 8: mod_base = OTHER; note = 2'-O-methyladenosine-3'-phosphate
  modified_base 9: mod_base = OTHER; note = 2'-O-methyladenosine-3'-phosphate
  modified_base 10: mod_base = OTHER; note = 2'-O-methyladenosine-3'-phosphate
  modified_base 11: mod_base = OTHER; note = 2'-O-methylguanosine-3'-phosphate
  modified_base 13: mod_base = OTHER; note = 2'-O-methyluridine-3'-phosphate
  modified_base 14: mod_base = OTHER; note = 2'-deoxy-2'-fluorouridine-3'-phosphate
  modified_base 15: mod_base = OTHER; note = 2'-O-methylguanosine-3'-phosphate
  modified_base 16: mod_base = OTHER; note = 2'-O-methylcytidine-3'-phosphate
  modified_base 17: mod_base = OTHER; note = 2'-O-methyluridine-3'-phosphate
  modified_base 18: mod_base = OTHER; note = 2'-O-methyluridine-3'-phosphate
  modified_base 19: mod_base = OTHER; note = 2'-O-methylcytidine-3'-phosphate
  modified_base 20: mod_base = OTHER; note = 2'-O-methylcytidine-3'-phosphate
  modified_base 21: mod_base = OTHER; note = 2'-O-methyluridine-3'-phosphorothioate
  modified_base 22: mod_base = OTHER; note = 2'-O-methyladenosine-3'-phosphorothioate
  modified_base 23: mod_base = OTHER; note = 2'-O-methylguanosine
  misc_feature 1: note = RNA
  misc_feature 3..4: note = RNA
  misc_feature 6: note = RNA
  misc_feature 8..11: note = RNA
  misc_feature 13..23: note = RNA
  misc_feature 2: note = DNA
  misc_feature 5: note = DNA
  misc_feature 7: note = DNA
  misc_feature 12: note = DNA
acaggcgaaaggttgcttcctag

SEQ ID NO: 1694 - DNA, 23 bp, synthetic construct
  source 1..23: mol_type = other DNA
  modified_base 1: mod_base = OTHER; note = 2'-O-methyluridine-3'-phosphorothioate
  modified_base 2: mod_base = OTHER; note = 2'-deoxycytidine-3'-phosphorothioate
  modified_base 3: mod_base = OTHER; note = 2'-O-methyluridine-3'-phosphate
  modified_base 4: mod_base = OTHER; note = 2'-O-methyladenosine-3'-phosphate
  modified_base 6: mod_base = OTHER; note = 2'-O-methylcytidine-3'-phosphate
  modified_base 8: mod_base = OTHER; note = 2'-O-methyluridine-3'-phosphate
  modified_base 9: mod_base = OTHER; note = 2'-O-methyluridine-3'-phosphate
  modified_base 10: mod_base = OTHER; note = 2'-O-methyluridine-3'-phosphate
  modified_base 11: mod_base = OTHER; note = 2'-O-methylcytidine-3'-phosphate
  modified_base 13: mod_base = OTHER; note = 2'-O-methyluridine-3'-phosphate
  modified_base 14: mod_base = OTHER; note = 2'-deoxy-2'-fluoroadenosine-3'-phosphate
  modified_base 15: mod_base = OTHER; note = 2'-O-methyladenosine-3'-phosphate
  modified_base 16: mod_base = OTHER; note = 2'-O-methyladenosine-3'-phosphate
  modified_base 17: mod_base = OTHER; note = 2'-O-methyladenosine-3'-phosphate
  modified_base 18: mod_base = OTHER; note = 2'-O-methylcytidine-3'-phosphate
  modified_base 19: mod_base = OTHER; note = 2'-O-methylcytidine-3'-phosphate
  modified_base 20: mod_base = OTHER; note = 2'-O-methyladenosine-3'-phosphate
  modified_base 21: mod_base = OTHER; note = 2'-O-methyladenosine-3'-phosphorothioate
  modified_base 22: mod_base = OTHER; note = 2'-O-methylcytidine-3'-phosphorothioate
  modified_base 23: mod_base = OTHER; note = 2'-O-methyluridine
  misc_feature 1: note = RNA
  misc_feature 3..4: note = RNA
  misc_feature 6: note = RNA
  misc_feature 8..11: note = RNA
  misc_feature 13..23: note = RNA
  misc_feature 2: note = DNA
  misc_feature 5: note = DNA
  misc_feature 7: note = DNA
  misc_feature 12: note = DNA
tctagcttttcataaaaccaact

SEQ ID NO: 1695 - DNA, 23 bp, synthetic construct
  source 1..23: mol_type = other DNA
  modified_base 1: mod_base = OTHER; note = 2'-O-methyluridine-3'-phosphorothioate
  modified_base 2: mod_base = OTHER; note = 2'-deoxyadenosine-3'-phosphorothioate
  modified_base 3: mod_base = OTHER; note = 2'-O-methylcytidine-3'-phosphate
  modified_base 4: mod_base = OTHER; note = 2'-O-methyladenosine-3'-phosphate
  modified_base 6: mod_base = OTHER; note = 2'-O-methyladenosine-3'-phosphate
  modified_base 8: mod_base = OTHER; note = 2'-O-methylguanosine-3'-phosphate
  modified_base 9: mod_base = OTHER; note = 2'-O-methyladenosine-3'-phosphate
  modified_base 10: mod_base = OTHER; note = 2'-O-methylcytidine-3'-phosphate
  modified_base 11: mod_base = OTHER; note = 2'-O-methyladenosine-3'-phosphate
  modified_base 13: mod_base = OTHER; note = 2'-O-methyluridine-3'-phosphate
  modified_base 14: mod_base = OTHER; note = 2'-deoxy-2'-fluoroadenosine-3'-phosphate
  modified_base 15: mod_base = OTHER; note = 2'-O-methyluridine-3'-phosphate
  modified_base 16: mod_base = OTHER; note = 2'-O-methylcytidine-3'-phosphate
  modified_base 17: mod_base = OTHER; note = 2'-O-methylcytidine-3'-phosphate
  modified_base 18: mod_base = OTHER; note = 2'-O-methyluridine-3'-phosphate
  modified_base 19: mod_base = OTHER; note = 2'-O-methyladenosine-3'-phosphate
  modified_base 20: mod_base = OTHER; note = 2'-O-methyladenosine-3'-phosphate
  modified_base 21: mod_base = OTHER; note = 2'-O-methyluridine-3'-phosphorothioate
  modified_base 22: mod_base = OTHER; note = 2'-O-methylguanosine-3'-phosphorothioate
  modified_base 23: mod_base = OTHER; note = 2'-O-methylguanosine
  misc_feature 1: note = RNA
  misc_feature 3..4: note = RNA
  misc_feature 6: note = RNA
  misc_feature 8..11: note = RNA
  misc_feature 13..23: note = RNA
  misc_feature 2: note = DNA
  misc_feature 5: note = DNA
  misc_feature 7: note = DNA
  misc_feature 12: note = DNA
tacataagacattatcctaatgg

SEQ ID NO: 1696 - DNA, 23 bp, synthetic construct
  source 1..23: mol_type = other DNA
  modified_base 1: mod_base = OTHER; note = 2'-O-methyluridine-3'-phosphorothioate
  modified_base 2: mod_base = OTHER; note = 2'-deoxyadenosine-3'-phosphorothioate
  modified_base 3: mod_base = OTHER; note = 2'-O-methylguanosine-3'-phosphate
  modified_base 4: mod_base = OTHER; note = 2'-O-methyladenosine-3'-phosphate
  modified_base 6: mod_base = OTHER; note = 2'-O-methyluridine-3'-phosphate
  modified_base 8: mod_base = OTHER; note = 2'-O-methylguanosine-3'-phosphate
  modified_base 9: mod_base = OTHER; note = 2'-O-methylcytidine-3'-phosphate
  modified_base 10: mod_base = OTHER; note = 2'-O-methylcytidine-3'-phosphate
  modified_base 11: mod_base = OTHER; note = 2'-O-methyluridine-3'-phosphate
  modified_base 13: mod_base = OTHER; note = 2'-O-methylcytidine-3'-phosphate
  modified_base 14: mod_base = OTHER; note = 2'-deoxy-2'-fluorouridine-3'-phosphate
  modified_base 15: mod_base = OTHER; note = 2'-O-methylcytidine-3'-phosphate
  modified_base 16: mod_base = OTHER; note = 2'-O-methyladenosine-3'-phosphate
  modified_base 17: mod_base = OTHER; note = 2'-O-methyladenosine-3'-phosphate
  modified_base 18: mod_base = OTHER; note = 2'-O-methylguanosine-3'-phosphate
  modified_base 19: mod_base = OTHER; note = 2'-O-methyluridine-3'-phosphate
  modified_base 20: mod_base = OTHER; note = 2'-O-methylguanosine-3'-phosphate
  modified_base 21: mod_base = OTHER; note = 2'-O-methyladenosine-3'-phosphorothioate
  modified_base 22: mod_base = OTHER; note = 2'-O-methylcytidine-3'-phosphorothioate
  modified_base 23: mod_base = OTHER; note = 2'-O-methyluridine
  misc_feature 1: note = RNA
  misc_feature 3..4: note = RNA
  misc_feature 6: note = RNA
  misc_feature 8..11: note = RNA
  misc_feature 13..23: note = RNA
  misc_feature 2: note = DNA
  misc_feature 5: note = DNA
  misc_feature 7: note = DNA
  misc_feature 12: note = DNA
tagactcgcctcctcaagtgact

SEQ ID NO: 1697 - DNA, 23 bp, synthetic construct
  source 1..23: mol_type = other DNA
  modified_base 1: mod_base = OTHER; note = 2'-O-methyluridine-3'-phosphorothioate
  modified_base 2: mod_base = OTHER; note = 2'-deoxyguanosine-3'-phosphorothioate
  modified_base 3: mod_base = OTHER; note = 2'-O-methyluridine-3'-phosphate
  modified_base 4: mod_base = OTHER; note = 2'-O-methyladenosine-3'-phosphate
  modified_base 6: mod_base = OTHER; note = 2'-O-methylcytidine-3'-phosphate
  modified_base 8: mod_base = OTHER; note = 2'-O-methyladenosine-3'-phosphate
  modified_base 9: mod_base = OTHER; note = 2'-O-methylguanosine-3'-phosphate
  modified_base 10: mod_base = OTHER; note = 2'-O-methyluridine-3'-phosphate
  modified_base 11: mod_base = OTHER; note = 2'-O-methyluridine-3'-phosphate
  modified_base 13: mod_base = OTHER; note = 2'-O-methylcytidine-3'-phosphate
  modified_base 14: mod_base = OTHER; note = 2'-deoxy-2'-fluoroadenosine-3'-phosphate
  modified_base 15: mod_base = OTHER; note = 2'-O-methyladenosine-3'-phosphate
  modified_base 16: mod_base = OTHER; note = 2'-O-methyladenosine-3'-phosphate
  modified_base 17: mod_base = OTHER; note = 2'-O-methyluridine-3'-phosphate
  modified_base 18: mod_base = OTHER; note = 2'-O-methylcytidine-3'-phosphate
  modified_base 19: mod_base = OTHER; note = 2'-O-methyluridine-3'-phosphate
  modified_base 20: mod_base = OTHER; note = 2'-O-methyluridine-3'-phosphate
  modified_base 21: mod_base = OTHER; note = 2'-O-methylguanosine-3'-phosphorothioate
  modified_base 22: mod_base = OTHER; note = 2'-O-methylcytidine-3'-phosphorothioate
  modified_base 23: mod_base = OTHER; note = 2'-O-methyluridine
  misc_feature 1: note = RNA
  misc_feature 3..4: note = RNA
  misc_feature 6: note = RNA
  misc_feature 8..11: note = RNA
  misc_feature 13..23: note = RNA
  misc_feature 2: note = DNA
  misc_feature 5: note = DNA
  misc_feature 7: note = DNA
  misc_feature 12: note = DNA
tgtagcaagttgcaaatcttgct

SEQ ID NO: 1698 - DNA, 23 bp, synthetic construct
  source 1..23: mol_type = other DNA
  modified_base 1: mod_base = OTHER; note = 2'-O-methyladenosine-3'-phosphorothioate
  modified_base 2: mod_base = OTHER; note = 2'-deoxycytidine-3'-phosphorothioate
  modified_base 3: mod_base = OTHER; note = 2'-O-methylguanosine-3'-phosphate
  modified_base 4: mod_base = OTHER; note = 2'-O-methylguanosine-3'-phosphate
  modified_base 6: mod_base = OTHER; note = 2'-O-methylguanosine-3'-phosphate
  modified_base 8: mod_base = OTHER; note = 2'-O-methyluridine-3'-phosphate
  modified_base 9: mod_base = OTHER; note = 2'-O-methylguanosine-3'-phosphate
  modified_base 10: mod_base = OTHER; note = 2'-O-methylguanosine-3'-phosphate
  modified_base 11: mod_base = OTHER; note = 2'-O-methyluridine-3'-phosphate
  modified_base 13: mod_base = OTHER; note = 2'-O-methylguanosine-3'-phosphate
  modified_base 14: mod_base = OTHER; note = 2'-deoxy-2'-fluorouridine-3'-phosphate
  modified_base 15: mod_base = OTHER; note = 2'-O-methyluridine-3'-phosphate
  modified_base 16: mod_base = OTHER; note = 2'-O-methyluridine-3'-phosphate
  modified_base 17: mod_base = OTHER; note = 2'-O-methyluridine-3'-phosphate
  modified_base 18: mod_base = OTHER; note = 2'-O-methylguanosine-3'-phosphate
  modified_base 19: mod_base = OTHER; note = 2'-O-methylguanosine-3'-phosphate
  modified_base 20: mod_base = OTHER; note = 2'-O-methylcytidine-3'-phosphate
  modified_base 21: mod_base = OTHER; note = 2'-O-methyladenosine-3'-phosphorothioate
  modified_base 22: mod_base = OTHER; note = 2'-O-methyluridine-3'-phosphorothioate
  modified_base 23: mod_base = OTHER; note = 2'-O-methylcytidine
  misc_feature 1: note = RNA
  misc_feature 3..4: note = RNA
  misc_feature 6: note = RNA
  misc_feature 8..11: note = RNA
  misc_feature 13..23: note = RNA
  misc_feature 2: note = DNA
  misc_feature 5: note = DNA
  misc_feature 7: note = DNA
  misc_feature 12: note = DNA
acggtgatggttgttttggcatc

SEQ ID NO: 1699 - DNA, 23 bp, synthetic construct
  source 1..23: mol_type = other DNA
  modified_base 1: mod_base = OTHER; note = 2'-O-methyladenosine-3'-phosphorothioate
  modified_base 2: mod_base = OTHER; note = 2'-deoxyadenosine-3'-phosphorothioate
  modified_base 3: mod_base = OTHER; note = 2'-O-methyluridine-3'-phosphate
  modified_base 4: mod_base = OTHER; note = 2'-O-methyladenosine-3'-phosphate
  modified_base 6: mod_base = OTHER; note = 2'-O-methylguanosine-3'-phosphate
  modified_base 8: mod_base = OTHER; note = 2'-O-methylcytidine-3'-phosphate
  modified_base 9: mod_base = OTHER; note = 2'-O-methyladenosine-3'-phosphate
  modified_base 10: mod_base = OTHER; note = 2'-O-methyluridine-3'-phosphate
  modified_base 11: mod_base = OTHER; note = 2'-O-methyluridine-3'-phosphate
  modified_base 13: mod_base = OTHER; note = 2'-O-methyluridine-3'-phosphate
  modified_base 14: mod_base = OTHER; note = 2'-deoxy-2'-fluorocytidine-3'-phosphate
  modified_base 15: mod_base = OTHER; note = 2'-O-methylcytidine-3'-phosphate
  modified_base 16: mod_base = OTHER; note = 2'-O-methyluridine-3'-phosphate
  modified_base 17: mod_base = OTHER; note = 2'-O-methyladenosine-3'-phosphate
  modified_base 18: mod_base = OTHER; note = 2'-O-methyladenosine-3'-phosphate
  modified_base 19: mod_base = OTHER; note = 2'-O-methyluridine-3'-phosphate
  modified_base 20: mod_base = OTHER; note = 2'-O-methylguanosine-3'-phosphate
  modified_base 21: mod_base = OTHER; note = 2'-O-methylguanosine-3'-phosphorothioate
  modified_base 22: mod_base = OTHER; note = 2'-O-methylguanosine-3'-phosphorothioate
  modified_base 23: mod_base = OTHER; note = 2'-O-methyluridine
  misc_feature 1: note = RNA
  misc_feature 3..4: note = RNA
  misc_feature 6: note = RNA
  misc_feature 8..11: note = RNA
  misc_feature 13..23: note = RNA
  misc_feature 2: note = DNA
  misc_feature 5: note = DNA
  misc_feature 7: note = DNA
  misc_feature 12: note = DNA
aataagacattatcctaatgggt

SEQ ID NO: 1700 - DNA, 23 bp, synthetic construct
  source 1..23: mol_type = other DNA
  modified_base 1: mod_base = OTHER; note = 2'-O-methyladenosine-3'-phosphorothioate
  modified_base 2: mod_base = OTHER; note = 2'-deoxyadenosine-3'-phosphorothioate
  modified_base 3: mod_base = OTHER; note = 2'-O-methyluridine-3'-phosphate
  modified_base 4: mod_base = OTHER; note = 2'-O-methyladenosine-3'-phosphate
  modified_base 6: mod_base = OTHER; note = 2'-O-methyladenosine-3'-phosphate
  modified_base 8: mod_base = OTHER; note = 2'-O-methyladenosine-3'-phosphate
  modified_base 9: mod_base = OTHER; note = 2'-O-methyladenosine-3'-phosphate
  modified_base 10: mod_base = OTHER; note = 2'-O-methyluridine-3'-phosphate
  modified_base 11: mod_base = OTHER; note = 2'-O-methyluridine-3'-phosphate
  modified_base 13: mod_base = OTHER; note = 2'-O-methyladenosine-3'-phosphate
  modified_base 14: mod_base = OTHER; note = 2'-deoxy-2'-fluoroadenosine-3'-phosphate
  modified_base 15: mod_base = OTHER; note = 2'-O-methylcytidine-3'-phosphate
  modified_base 16: mod_base = OTHER; note = 2'-O-methyladenosine-3'-phosphate
  modified_base 17: mod_base = OTHER; note = 2'-O-methylguanosine-3'-phosphate
  modified_base 18: mod_base = OTHER; note = 2'-O-methylguanosine-3'-phosphate
  modified_base 19: mod_base = OTHER; note = 2'-O-methyluridine-3'-phosphate
  modified_base 20: mod_base = OTHER; note = 2'-O-methyladenosine-3'-phosphate
  modified_base 21: mod_base = OTHER; note = 2'-O-methyladenosine-3'-phosphorothioate
  modified_base 22: mod_base = OTHER; note = 2'-O-methylcytidine-3'-phosphorothioate
  modified_base 23: mod_base = OTHER; note = 2'-O-methyladenosine
  misc_feature 1: note = RNA
  misc_feature 3..4: note = RNA
  misc_feature 6: note = RNA
  misc_feature 8..11: note = RNA
  misc_feature 13..23: note = RNA
  misc_feature 2: note = DNA
  misc_feature 5: note = DNA
  misc_feature 7: note = DNA
  misc_feature 12: note = DNA
aatacaaaattcaacaggtaaca

SEQ ID NO: 1701 - RNA, 23 nt, synthetic construct
  source 1..23: mol_type = other RNA
  modified_base 1: mod_base = OTHER; note = 2'-O-methyladenosine-3'-phosphorothioate
  modified_base 2: mod_base = OTHER; note = 2'-deoxy-2'-fluorocytidine-3'-phosphorothioate
  modified_base 3: mod_base = OTHER; note = 2'-O-methylguanosine-3'-phosphate
  modified_base 4: mod_base = OTHER; note = 2'-O-methylguanosine-3'-phosphate
  modified_base 5: mod_base = OTHER; note = 2'-O-methyluridine-3'-phosphate
  modified_base 6: mod_base = OTHER; note = 2'-deoxy-2'-fluoroguanosine-3'-phosphate
  modified_base 7: mod_base = OTHER; note = 2'-O-methyladenosine-3'-phosphate
  modified_base 8: mod_base = OTHER; note = 2'-deoxy-2'-fluorouridine-3'-phosphate
  modified_base 9: mod_base = OTHER; note = 2'-deoxy-2'-fluoroguanosine-3'-phosphate
  modified_base 10: mod_base = OTHER; note = 2'-O-methylguanosine-3'-phosphate
  modified_base 11: mod_base = OTHER; note = 2'-O-methyluridine-3'-phosphate
  modified_base 12: mod_base = OTHER; note = 2'-O-methyluridine-3'-phosphate
  modified_base 13: mod_base = OTHER; note = 2'-O-methylguanosine-3'-phosphate
  modified_base 14: mod_base = OTHER; note = 2'-deoxy-2'-fluorouridine-3'-phosphate
  modified_base 15: mod_base = OTHER; note = 2'-O-methyluridine-3'-phosphate
  modified_base 16: mod_base = OTHER; note = 2'-deoxy-2'-fluorouridine-3'-phosphate
  modified_base 17: mod_base = OTHER; note = 2'-O-methyluridine-3'-phosphate
  modified_base 18: mod_base = OTHER; note = 2'-O-methylguanosine-3'-phosphate
  modified_base 19: mod_base = OTHER; note = 2'-O-methylguanosine-3'-phosphate
  modified_base 20: mod_base = OTHER; note = 2'-O-methylcytidine-3'-phosphate
  modified_base 21: mod_base = OTHER; note = 2'-O-methyladenosine-3'-phosphorothioate
  modified_base 22: mod_base = OTHER; note = 2'-O-methyluridine-3'-phosphorothioate
  modified_base 23: mod_base = OTHER; note = 2'-O-methylcytidine
acggtgatggttgttttggcatc

SEQ ID NO: 1702 - RNA, 23 nt, synthetic construct
  source 1..23: mol_type = other RNA
  modified_base 1: mod_base = OTHER; note = 2'-O-methyladenosine-3'-phosphorothioate
  modified_base 2: mod_base = OTHER; note = 2'-deoxy-2'-fluoroadenosine-3'-phosphorothioate
  modified_base 3: mod_base = OTHER; note = 2'-O-methyluridine-3'-phosphate
  modified_base 4: mod_base = OTHER; note = 2'-O-methyladenosine-3'-phosphate
  modified_base 5: mod_base = OTHER; note = 2'-O-methyladenosine-3'-phosphate
  modified_base 6: mod_base = OTHER; note = 2'-deoxy-2'-fluoroguanosine-3'-phosphate
  modified_base 7: mod_base = OTHER; note = 2'-O-methyladenosine-3'-phosphate
  modified_base 8: mod_base = OTHER; note = 2'-deoxy-2'-fluorocytidine-3'-phosphate
  modified_base 9: mod_base = OTHER; note = 2'-deoxy-2'-fluoroadenosine-3'-phosphate
  modified_base 10: mod_base = OTHER; note = 2'-O-methyluridine-3'-phosphate
  modified_base 11: mod_base = OTHER; note = 2'-O-methyluridine-3'-phosphate
  modified_base 12: mod_base = OTHER; note = 2'-O-methyladenosine-3'-phosphate
  modified_base 13: mod_base = OTHER; note = 2'-O-methyluridine-3'-phosphate
  modified_base 14: mod_base = OTHER; note = 2'-deoxy-2'-fluorocytidine-3'-phosphate
  modified_base 15: mod_base = OTHER; note = 2'-O-methylcytidine-3'-phosphate
  modified_base 16: mod_base = OTHER; note = 2'-deoxy-2'-fluorouridine-3'-phosphate
  modified_base 17: mod_base = OTHER; note = 2'-O-methyladenosine-3'-phosphate
  modified_base 18: mod_base = OTHER; note = 2'-O-methyladenosine-3'-phosphate
  modified_base 19: mod_base = OTHER; note = 2'-O-methyluridine-3'-phosphate
  modified_base 20: mod_base = OTHER; note = 2'-O-methylguanosine-3'-phosphate
  modified_base 21: mod_base = OTHER; note = 2'-O-methylguanosine-3'-phosphorothioate
  modified_base 22: mod_base = OTHER; note = 2'-O-methylguanosine-3'-phosphorothioate
  modified_base 23: mod_base = OTHER; note = 2'-O-methyluridine
aataagacattatcctaatgggt

SEQ ID NO: 1703 - RNA, 23 nt, synthetic construct
  source 1..23: mol_type = other RNA
  modified_base 1: mod_base = OTHER; note = 2'-O-methyladenosine-3'-phosphorothioate
  modified_base 2: mod_base = OTHER; note = 2'-deoxy-2'-fluorouridine-3'-phosphorothioate
  modified_base 3: mod_base = OTHER; note = 2'-O-methyluridine-3'-phosphate
  modified_base 4: mod_base = OTHER; note = 2'-O-methyladenosine-3'-phosphate
  modified_base 5: mod_base = OTHER; note = 2'-O-methylcytidine-3'-phosphate
  modified_base 6: mod_base = OTHER; note = 2'-deoxy-2'-fluoroadenosine-3'-phosphate
  modified_base 7: mod_base = OTHER; note = 2'-O-methyluridine-3'-phosphate
  modified_base 8: mod_base = OTHER; note = 2'-deoxy-2'-fluoroadenosine-3'-phosphate
  modified_base 9: mod_base = OTHER; note = 2'-deoxy-2'-fluoroadenosine-3'-phosphate
  modified_base 10: mod_base = OTHER; note = 2'-O-methylguanosine-3'-phosphate
  modified_base 11: mod_base = OTHER; note = 2'-O-methyladenosine-3'-phosphate
  modified_base 12: mod_base = OTHER; note = 2'-O-methylcytidine-3'-phosphate
  modified_base 13: mod_base = OTHER; note = 2'-O-methyladenosine-3'-phosphate
  modified_base 14: mod_base = OTHER; note = 2'-deoxy-2'-fluorouridine-3'-phosphate
  modified_base 15: mod_base = OTHER; note = 2'-O-methyluridine-3'-phosphate
  modified_base 16: mod_base = OTHER; note = 2'-deoxy-2'-fluoroadenosine-3'-phosphate
  modified_base 17: mod_base = OTHER; note = 2'-O-methyluridine-3'-phosphate
  modified_base 18: mod_base = OTHER; note = 2'-O-methylcytidine-3'-phosphate
  modified_base 19: mod_base = OTHER; note = 2'-O-methylcytidine-3'-phosphate
  modified_base 20: mod_base = OTHER; note = 2'-O-methyluridine-3'-phosphate
  modified_base 21: mod_base = OTHER; note = 2'-O-methyladenosine-3'-phosphorothioate
  modified_base 22: mod_base = OTHER; note = 2'-O-methyladenosine-3'-phosphorothioate
  modified_base 23: mod_base = OTHER; note = 2'-O-methyluridine
attacataagacattatcctaat

SEQ ID NO: 1704 - RNA, 23 nt, synthetic construct
  source 1..23: mol_type = other RNA
  modified_base 1: mod_base = OTHER; note = 2'-O-methyladenosine-3'-phosphorothioate
  modified_base 2: mod_base = OTHER; note = 2'-deoxy-2'-fluoroadenosine-3'-phosphorothioate
  modified_base 3: mod_base = OTHER; note = 2'-O-methylguanosine-3'-phosphate
  modified_base 4: mod_base = OTHER; note = 2'-O-methylcytidine-3'-phosphate
  modified_base 5: mod_base = OTHER; note = 2'-O-methyladenosine-3'-phosphate
  modified_base 6: mod_base = OTHER; note = 2'-deoxy-2'-fluorouridine-3'-phosphate
  modified_base 7: mod_base = OTHER; note = 2'-O-methyluridine-3'-phosphate
  modified_base 8: mod_base = OTHER; note = 2'-deoxy-2'-fluoroadenosine-3'-phosphate
  modified_base 9: mod_base = OTHER; note = 2'-deoxy-2'-fluorocytidine-3'-phosphate
  modified_base 10: mod_base = OTHER; note = 2'-O-methyladenosine-3'-phosphate
  modified_base 11: mod_base = OTHER; note = 2'-O-methyluridine-3'-phosphate
  modified_base 12: mod_base = OTHER; note = 2'-O-methyladenosine-3'-phosphate
  modified_base 13: mod_base = OTHER; note = 2'-O-methyladenosine-3'-phosphate
  modified_base 14: mod_base = OTHER; note = 2'-deoxy-2'-fluoroguanosine-3'-phosphate
  modified_base 15: mod_base = OTHER; note = 2'-O-methyladenosine-3'-phosphate
  modified_base 16: mod_base = OTHER; note = 2'-deoxy-2'-fluorocytidine-3'-phosphate
  modified_base 17: mod_base = OTHER; note = 2'-O-methyladenosine-3'-phosphate
  modified_base 18: mod_base = OTHER; note = 2'-O-methyluridine-3'-phosphate
  modified_base 19: mod_base = OTHER; note = 2'-O-methyluridine-3'-phosphate
  modified_base 20: mod_base = OTHER; note = 2'-O-methyladenosine-3'-phosphate
  modified_base 21: mod_base = OTHER; note = 2'-O-methyluridine-3'-phosphorothioate
  modified_base 22: mod_base = OTHER; note = 2'-O-methylcytidine-3'-phosphorothioate
  modified_base 23: mod_base = OTHER; note = 2'-O-methylcytidine
aagcattacataagacattatcc

SEQ ID NO: 1705 - RNA, 23 nt, synthetic construct
  source 1..23: mol_type = other RNA
  modified_base 1: mod_base = OTHER; note = 2'-O-methyladenosine-3'-phosphorothioate
  modified_base 2: mod_base = OTHER; note = 2'-deoxy-2'-fluorouridine-3'-phosphorothioate
  modified_base 3: mod_base = OTHER; note = 2'-O-methyluridine-3'-phosphate
  modified_base 4: mod_base = OTHER; note = 2'-O-methyluridine-3'-phosphate
  modified_base 5: mod_base = OTHER; note = 2'-O-methyluridine-3'-phosphate
  modified_base 6: mod_base = OTHER; note = 2'-deoxy-2'-fluorocytidine-3'-phosphate
  modified_base 7: mod_base = OTHER; note = 2'-O-methyladenosine-3'-phosphate
  modified_base 8: mod_base = OTHER; note = 2'-deoxy-2'-fluorouridine-3'-phosphate
  modified_base 9: mod_base = OTHER; note = 2'-deoxy-2'-fluoroadenosine-3'-phosphate
  modified_base 10: mod_base = OTHER; note = 2'-O-methyladenosine-3'-phosphate
  modified_base 11: mod_base = OTHER; note = 2'-O-methyladenosine-3'-phosphate
  modified_base 12: mod_base = OTHER; note = 2'-O-methyladenosine-3'-phosphate
  modified_base 13: mod_base = OTHER; note = 2'-O-methylcytidine-3'-phosphate
  modified_base 14: mod_base = OTHER; note = 2'-deoxy-2'-fluorocytidine-3'-phosphate
  modified_base 15: mod_base = OTHER; note = 2'-O-methyladenosine-3'-phosphate
  modified_base 16: mod_base = OTHER; note = 2'-deoxy-2'-fluoroadenosine-3'-phosphate
  modified_base 17: mod_base = OTHER; note = 2'-O-methylcytidine-3'-phosphate
  modified_base 18: mod_base = OTHER; note = 2'-O-methyluridine-3'-phosphate
  modified_base 19: mod_base = OTHER; note = 2'-O-methylcytidine-3'-phosphate
  modified_base 20: mod_base = OTHER; note = 2'-O-methyladenosine-3'-phosphate
  modified_base 21: mod_base = OTHER; note = 2'-O-methylguanosine-3'-phosphorothioate
  modified_base 22: mod_base = OTHER; note = 2'-O-methylcytidine-3'-phosphorothioate
  modified_base 23: mod_base = OTHER; note = 2'-O-methyluridine
attttcataaaaccaactcagct

SEQ ID NO: 1706 - RNA, 23 nt, synthetic construct
  source 1..23: mol_type = other RNA
  modified_base 1: mod_base = OTHER; note = 2'-O-methyladenosine-3'-phosphorothioate
  modified_base 2: mod_base = OTHER; note = 2'-deoxy-2'-fluorocytidine-3'-phosphorothioate
  modified_base 3: mod_base = OTHER; note = 2'-O-methyladenosine-3'-phosphate
  modified_base 4: mod_base = OTHER; note = 2'-O-methylguanosine-3'-phosphate
  modified_base 5: mod_base = OTHER; note = 2'-O-methylguanosine-3'-phosphate
  modified_base 6: mod_base = OTHER; note = 2'-deoxy-2'-fluorocytidine-3'-phosphate
  modified_base 7: mod_base = OTHER; note = 2'-O-methylguanosine-3'-phosphate
  modified_base 8: mod_base = OTHER; note = 2'-deoxy-2'-fluoroadenosine-3'-phosphate
  modified_base 9: mod_base = OTHER; note = 2'-deoxy-2'-fluoroadenosine-3'-phosphate
  modified_base 10: mod_base = OTHER; note = 2'-O-methyladenosine-3'-phosphate
  modified_base 11: mod_base = OTHER; note = 2'-O-methylguanosine-3'-phosphate
  modified_base 12: mod_base = OTHER; note = 2'-O-methylguanosine-3'-phosphate
  modified_base 13: mod_base = OTHER; note = 2'-O-methyluridine-3'-phosphate
  modified_base 14: mod_base = OTHER; note = 2'-deoxy-2'-fluorouridine-3'-phosphate
  modified_base 15: mod_base = OTHER; note = 2'-O-methylguanosine-3'-phosphate
  modified_base 16: mod_base = OTHER; note = 2'-deoxy-2'-fluorocytidine-3'-phosphate
  modified_base 17: mod_base = OTHER; note = 2'-O-methyluridine-3'-phosphate
  modified_base 18: mod_base = OTHER; note = 2'-O-methyluridine-3'-phosphate
  modified_base 19: mod_base = OTHER; note = 2'-O-methylcytidine-3'-phosphate
  modified_base 20: mod_base = OTHER; note = 2'-O-methylcytidine-3'-phosphate
  modified_base 21: mod_base = OTHER; note = 2'-O-methyluridine-3'-phosphorothioate
  modified_base 22: mod_base = OTHER; note = 2'-O-methyladenosine-3'-phosphorothioate
  modified_base 23: mod_base = OTHER; note = 2'-O-methylguanosine
acaggcgaaaggttgcttcctag

SEQ ID NO: 1707 - RNA, 23 nt, synthetic construct
  source 1..23: mol_type = other RNA
  modified_base 1: mod_base = OTHER; note = 2'-O-methyladenosine-3'-phosphorothioate
  modified_base 2: mod_base = OTHER; note = 2'-deoxy-2'-fluorocytidine-3'-phosphorothioate
  modified_base 3: mod_base = OTHER; note = 2'-O-methyladenosine-3'-phosphate
  modified_base 4: mod_base = OTHER; note = 2'-O-methyluridine-3'-phosphate
  modified_base 5: mod_base = OTHER; note = 2'-O-methyluridine-3'-phosphate
  modified_base 6: mod_base = OTHER; note = 2'-deoxy-2'-fluorocytidine-3'-phosphate
  modified_base 7: mod_base = OTHER; note = 2'-O-methyluridine-3'-phosphate
  modified_base 8: mod_base = OTHER; note = 2'-deoxy-2'-fluoroadenosine-3'-phosphate
  modified_base 9: mod_base = OTHER; note = 2'-deoxy-2'-fluoroadenosine-3'-phosphate
  modified_base 10: mod_base = OTHER; note = 2'-O-methylguanosine-3'-phosphate
  modified_base 11: mod_base = OTHER; note = 2'-O-methyladenosine-3'-phosphate
  modified_base 12: mod_base = OTHER; note = 2'-O-methyladenosine-3'-phosphate
  modified_base 13: mod_base = OTHER; note = 2'-O-methylcytidine-3'-phosphate
  modified_base 14: mod_base = OTHER; note = 2'-deoxy-2'-fluorocytidine-3'-phosphate
  modified_base 15: mod_base = OTHER; note = 2'-O-methyluridine-3'-phosphate
  modified_base 16: mod_base = OTHER; note = 2'-deoxy-2'-fluorocytidine-3'-phosphate
  modified_base 17: mod_base = OTHER; note = 2'-O-methyladenosine-3'-phosphate
  modified_base 18: mod_base = OTHER; note = 2'-O-methyluridine-3'-phosphate
  modified_base 19: mod_base = OTHER; note = 2'-O-methylguanosine-3'-phosphate
  modified_base 20: mod_base = OTHER; note = 2'-O-methylcytidine-3'-phosphate
  modified_base 21: mod_base = OTHER; note = 2'-O-methyluridine-3'-phosphorothioate
  modified_base 22: mod_base = OTHER; note = 2'-O-methylguanosine-3'-phosphorothioate
  modified_base 23: mod_base = OTHER; note = 2'-O-methylguanosine
acattctaagaacctcatgctgg

SEQ ID NO: 1708 - RNA, 23 nt, synthetic construct
  source 1..23: mol_type = other RNA
  modified_base 1: mod_base = OTHER; note = 2'-O-methyladenosine-3'-phosphorothioate
  modified_base 2: mod_base = OTHER; note = 2'-deoxy-2'-fluoroguanosine-3'-phosphorothioate
  modified_base 3: mod_base = OTHER; note = 2'-O-methyluridine-3'-phosphate
  modified_base 4: mod_base = OTHER; note = 2'-O-methylguanosine-3'-phosphate
  modified_base 5: mod_base = OTHER; note = 2'-O-methyladenosine-3'-phosphate
  modified_base 6: mod_base = OTHER; note = 2'-deoxy-2'-fluoroadenosine-3'-phosphate
  modified_base 7: mod_base = OTHER; note = 2'-O-methyladenosine-3'-phosphate
  modified_base 8: mod_base = OTHER; note = 2'-deoxy-2'-fluoroadenosine-3'-phosphate
  modified_base 9: mod_base = OTHER; note = 2'-deoxy-2'-fluoroadenosine-3'-phosphate
  modified_base 10: mod_base = OTHER; note = 2'-O-methylguanosine-3'-phosphate
  modified_base 11: mod_base = OTHER; note = 2'-O-methylguanosine-3'-phosphate
  modified_base 12: mod_base = OTHER; note = 2'-O-methyluridine-3'-phosphate
  modified_base 13: mod_base = OTHER; note = 2'-O-methylguanosine-3'-phosphate
  modified_base 14: mod_base = OTHER; note = 2'-deoxy-2'-fluorouridine-3'-phosphate
  modified_base 15: mod_base = OTHER; note = 2'-O-methyluridine-3'-phosphate
  modified_base 16: mod_base = OTHER; note = 2'-deoxy-2'-fluorocytidine-3'-phosphate
  modified_base 17: mod_base = OTHER; note = 2'-O-methyluridine-3'-phosphate
  modified_base 18: mod_base = OTHER; note = 2'-O-methyladenosine-3'-phosphate
  modified_base 19: mod_base = OTHER; note = 2'-O-methyladenosine-3'-phosphate
  modified_base 20: mod_base = OTHER; note = 2'-O-methyladenosine-3'-phosphate
  modified_base 21: mod_base = OTHER; note = 2'-O-methyladenosine-3'-phosphorothioate
  modified_base 22: mod_base = OTHER; note = 2'-O-methyluridine-3'-phosphorothioate
  modified_base 23: mod_base = OTHER; note = 2'-O-methyluridine
agtgaaaaaggtgttctaaaatt

SEQ ID NO: 1709 - RNA, 23 nt, synthetic construct
  source 1..23: mol_type = other RNA
  modified_base 1: mod_base = OTHER; note = 2'-O-methyladenosine-3'-phosphorothioate
  modified_base 2: mod_base = OTHER; note = 2'-deoxy-2'-fluorouridine-3'-phosphorothioate
  modified_base 3: mod_base = OTHER; note = 2'-O-methyluridine-3'-phosphate
  modified_base 4: mod_base = OTHER; note = 2'-O-methyladenosine-3'-phosphate
  modified_base 5: mod_base = OTHER; note = 2'-O-methylguanosine-3'-phosphate
  modified_base 6: mod_base = OTHER; note = 2'-deoxy-2'-fluorouridine-3'-phosphate
  modified_base 7: mod_base = OTHER; note = 2'-O-methyluridine-3'-phosphate
  modified_base 8: mod_base = OTHER; note = 2'-deoxy-2'-fluoroadenosine-3'-phosphate
  modified_base 9: mod_base = OTHER; note = 2'-deoxy-2'-fluoroguanosine-3'-phosphate
  modified_base 10: mod_base = OTHER; note = 2'-O-methylguanosine-3'-phosphate
  modified_base 11: mod_base = OTHER; note = 2'-O-methyluridine-3'-phosphate
  modified_base 12: mod_base = OTHER; note = 2'-O-methylguanosine-3'-phosphate
  modified_base 13: mod_base = OTHER; note = 2'-O-methyladenosine-3'-phosphate
  modified_base 14: mod_base = OTHER; note = 2'-deoxy-2'-fluoroadenosine-3'-phosphate
  modified_base 15: mod_base = OTHER; note = 2'-O-methyladenosine-3'-phosphate
  modified_base 16: mod_base = OTHER; note = 2'-deoxy-2'-fluoroadenosine-3'-phosphate
  modified_base 17: mod_base = OTHER; note = 2'-O-methyladenosine-3'-phosphate
  modified_base 18: mod_base = OTHER; note = 2'-O-methylguanosine-3'-phosphate
  modified_base 19: mod_base = OTHER; note = 2'-O-methylguanosine-3'-phosphate
  modified_base 20: mod_base = OTHER; note = 2'-O-methyluridine-3'-phosphate
  modified_base 21: mod_base = OTHER; note = 2'-O-methylguanosine-3'-phosphorothioate
  modified_base 22: mod_base = OTHER; note = 2'-O-methyluridine-3'-phosphorothioate
  modified_base 23: mod_base = OTHER; note = 2'-O-methyluridine
attagttaggtgaaaaaggtgtt

SEQ ID NO: 1710 - RNA, 23 nt, synthetic construct
  source 1..23: mol_type = other RNA
  modified_base 1: mod_base = OTHER; note = 2'-O-methyluridine-3'-phosphorothioate
  modified_base 2: mod_base = OTHER; note = 2'-deoxy-2'-fluoroadenosine-3'-phosphorothioate
  modified_base 3: mod_base = OTHER; note = 2'-O-methyladenosine-3'-phosphate
  modified_base 4: mod_base = OTHER; note = 2'-O-methylguanosine-3'-phosphate
  modified_base 5: mod_base = OTHER; note = 2'-O-methylguanosine-3'-phosphate
  modified_base 6: mod_base = OTHER; note = 2'-deoxy-2'-fluoroadenosine-3'-phosphate
  modified_base 7: mod_base = OTHER; note = 2'-O-methyladenosine-3'-phosphate
  modified_base 8: mod_base = OTHER; note = 2'-deoxy-2'-fluoroguanosine-3'-phosphate
  modified_base 9: mod_base = OTHER; note = 2'-deoxy-2'-fluoroguanosine-3'-phosphate
  modified_base 10: mod_base = OTHER; note = 2'-O-methyladenosine-3'-phosphate
  modified_base 11: mod_base = OTHER; note = 2'-O-methylguanosine-3'-phosphate
  modified_base 12: mod_base = OTHER; note = 2'-O-methylguanosine-3'-phosphate
  modified_base 13: mod_base = OTHER; note = 2'-O-methylguanosine-3'-phosphate
  modified_base 14: mod_base = OTHER; note = 2'-deoxy-2'-fluoroadenosine-3'-phosphate
  modified_base 15: mod_base = OTHER; note = 2'-O-methyluridine-3'-phosphate
  modified_base 16: mod_base = OTHER; note = 2'-deoxy-2'-fluoroadenosine-3'-phosphate
  modified_base 17: mod_base = OTHER; note = 2'-O-methyladenosine-3'-phosphate
  modified_base 18: mod_base = OTHER; note = 2'-O-methylguanosine-3'-phosphate
  modified_base 19: mod_base = OTHER; note = 2'-O-methylguanosine-3'-phosphate
  modified_base 20: mod_base = OTHER; note = 2'-O-methylcytidine-3'-phosphate
  modified_base 21: mod_base = OTHER; note = 2'-O-methylcytidine-3'-phosphorothioate
  modified_base 22: mod_base = OTHER; note = 2'-O-methyladenosine-3'-phosphorothioate
  modified_base 23: mod_base = OTHER; note = 2'-O-methylcytidine
taaggaaggagggataaggccac

SEQ ID NO: 1711 - RNA, 23 nt, synthetic construct
  source 1..23: mol_type = other RNA
  modified_base 1: mod_base = OTHER; note = 2'-O-methyluridine-3'-phosphorothioate
  modified_base 2: mod_base = OTHER; note = 2'-deoxy-2'-fluorouridine-3'-phosphorothioate
  modified_base 3: mod_base = OTHER; note = 2'-O-methylguanosine-3'-phosphate
  modified_base 4: mod_base = OTHER; note = 2'-O-methylcytidine-3'-phosphate
  modified_base 5: mod_base = OTHER; note = 2'-O-methyladenosine-3'-phosphate
  modified_base 6: mod_base = OTHER; note = 2'-deoxy-2'-fluoroadenosine-3'-phosphate
  modified_base 7: mod_base = OTHER; note = 2'-O-methyladenosine-3'-phosphate
  modified_base 8: mod_base = OTHER; note = 2'-deoxy-2'-fluorouridine-3'-phosphate
  modified_base 9: mod_base = OTHER; note = 2'-deoxy-2'-fluorocytidine-3'-phosphate
  modified_base 10: mod_base = OTHER; note = 2'-O-methyluridine-3'-phosphate
  modified_base 11: mod_base = OTHER; note = 2'-O-methyluridine-3'-phosphate
  modified_base 12: mod_base = OTHER; note = 2'-O-methylguanosine-3'-phosphate
  modified_base 13: mod_base = OTHER; note = 2'-O-methylcytidine-3'-phosphate
  modified_base 14: mod_base = OTHER; note = 2'-deoxy-2'-fluorouridine-3'-phosphate
  modified_base 15: mod_base = OTHER; note = 2'-O-methylcytidine-3'-phosphate
  modified_base 16: mod_base = OTHER; note = 2'-deoxy-2'-fluoroadenosine-3'-phosphate
  modified_base 17: mod_base = OTHER; note = 2'-O-methyluridine-3'-phosphate
  modified_base 18: mod_base = OTHER; note = 2'-O-methylguanosine-3'-phosphate
  modified_base 19: mod_base = OTHER; note = 2'-O-methyluridine-3'-phosphate
  modified_base 20: mod_base = OTHER; note = 2'-O-methyladenosine-3'-phosphate
  modified_base 21: mod_base = OTHER; note = 2'-O-methyluridine-3'-phosphorothioate
  modified_base 22: mod_base = OTHER; note = 2'-O-methylcytidine-3'-phosphorothioate
  modified_base 23: mod_base = OTHER; note = 2'-O-methylcytidine
ttgcaaatcttgctcatgtatcc

SEQ ID NO: 1712 - RNA, 23 nt, synthetic construct
  source 1..23: mol_type = other RNA
  modified_base 1: mod_base = OTHER; note = 2'-O-methyladenosine-3'-phosphorothioate
  modified_base 2: mod_base = OTHER; note = 2'-deoxy-2'-fluorouridine-3'-phosphorothioate
  modified_base 3: mod_base = OTHER; note = 2'-O-methyladenosine-3'-phosphate
  modified_base 4: mod_base = OTHER; note = 2'-O-methyladenosine-3'-phosphate
  modified_base 5: mod_base = OTHER; note = 2'-O-methyladenosine-3'-phosphate
  modified_base 6: mod_base = OTHER; note = 2'-deoxy-2'-fluoroadenosine-3'-phosphate
  modified_base 7: mod_base = OTHER; note = 2'-O-methylcytidine-3'-phosphate
  modified_base 8: mod_base = OTHER; note = 2'-deoxy-2'-fluorocytidine-3'-phosphate
  modified_base 9: mod_base = OTHER; note = 2'-deoxy-2'-fluoroadenosine-3'-phosphate
  modified_base 10: mod_base = OTHER; note = 2'-O-methyladenosine-3'-phosphate
  modified_base 11: mod_base = OTHER; note = 2'-O-methylcytidine-3'-phosphate
  modified_base 12: mod_base = OTHER; note = 2'-O-methyluridine-3'-phosphate
  modified_base 13: mod_base = OTHER; note = 2'-O-methylcytidine-3'-phosphate
  modified_base 14: mod_base = OTHER; note = 2'-deoxy-2'-fluoroadenosine-3'-phosphate
  modified_base 15: mod_base = OTHER; note = 2'-O-methylguanosine-3'-phosphate
  modified_base 16: mod_base = OTHER; note = 2'-deoxy-2'-fluorocytidine-3'-phosphate
  modified_base 17: mod_base = OTHER; note = 2'-O-methyluridine-3'-phosphate
  modified_base 18: mod_base = OTHER; note = 2'-O-methylcytidine-3'-phosphate
  modified_base 19: mod_base = OTHER; note = 2'-O-methyladenosine-3'-phosphate
  modified_base 20: mod_base = OTHER; note = 2'-O-methylguanosine-3'-phosphate
  modified_base 21: mod_base = OTHER; note = 2'-O-methyladenosine-3'-phosphorothioate
  modified_base 22: mod_base = OTHER; note = 2'-O-methylguanosine-3'-phosphorothioate
  modified_base 23: mod_base = OTHER; note = 2'-O-methylguanosine
ataaaaccaactcagctcagagg

SEQ ID NO: 1713 - RNA, 23 nt, synthetic construct
  source 1..23: mol_type = other RNA
  modified_base 1: mod_base = OTHER; note = 2'-O-methyluridine-3'-phosphorothioate
  modified_base 2: mod_base = OTHER; note = 2'-deoxy-2'-fluoroadenosine-3'-phosphorothioate
  modified_base 3: mod_base = OTHER; note = 2'-O-methyladenosine-3'-phosphate
  modified_base 4: mod_base = OTHER; note = 2'-O-methylcytidine-3'-phosphate
  modified_base 5: mod_base = OTHER; note = 2'-O-methyladenosine-3'-phosphate
  modified_base 6: mod_base = OTHER; note = 2'-deoxy-2'-fluoroguanosine-3'-phosphate
  modified_base 7: mod_base = OTHER; note = 2'-O-methyluridine-3'-phosphate
  modified_base 8: mod_base = OTHER; note = 2'-deoxy-2'-fluorocytidine-3'-phosphate
  modified_base 9: mod_base = OTHER; note = 2'-deoxy-2'-fluorouridine-3'-phosphate
  modified_base 10: mod_base = OTHER; note = 2'-O-methylguanosine-3'-phosphate
  modified_base 11: mod_base = OTHER; note = 2'-O-methyladenosine-3'-phosphate
  modified_base 12: mod_base = OTHER; note = 2'-O-methylcytidine-3'-phosphate
  modified_base 13: mod_base = OTHER; note = 2'-O-methylcytidine-3'-phosphate
  modified_base 14: mod_base = OTHER; note = 2'-deoxy-2'-fluoroadenosine-3'-phosphate
  modified_base 15: mod_base = OTHER; note = 2'-O-methyluridine-3'-phosphate
  modified_base 16: mod_base = OTHER; note = 2'-deoxy-2'-fluorouridine-3'-phosphate
  modified_base 17: mod_base = OTHER; note = 2'-O-methyladenosine-3'-phosphate
  modified_base 18: mod_base = OTHER; note = 2'-O-methyladenosine-3'-phosphate
  modified_base 19: mod_base = OTHER; note = 2'-O-methyluridine-3'-phosphate
  modified_base 20: mod_base = OTHER; note = 2'-O-methyladenosine-3'-phosphate
  modified_base 21: mod_base = OTHER; note = 2'-O-methylguanosine-3'-phosphorothioate
  modified_base 22: mod_base = OTHER; note = 2'-O-methylguanosine-3'-phosphorothioate
  modified_base 23: mod_base = OTHER; note = 2'-O-methylguanosine
taacagtctgaccattaataggg

SEQ ID NO: 1714 - RNA, 23 nt, synthetic construct
  source 1..23: mol_type = other RNA
  modified_base 1: mod_base = OTHER; note = 2'-O-methyluridine-3'-phosphorothioate
  modified_base 2: mod_base = OTHER; note = 2'-deoxy-2'-fluoroadenosine-3'-phosphorothioate
  modified_base 3: mod_base = OTHER; note = 2'-O-methyladenosine-3'-phosphate
  modified_base 4: mod_base = OTHER; note = 2'-O-methyladenosine-3'-phosphate
  modified_base 5: mod_base = OTHER; note = 2'-O-methyluridine-3'-phosphate
  modified_base 6: mod_base = OTHER; note = 2'-deoxy-2'-fluorocytidine-3'-phosphate
  modified_base 7: mod_base = OTHER; note = 2'-O-methyluridine-3'-phosphate
  modified_base 8: mod_base = OTHER; note = 2'-deoxy-2'-fluorouridine-3'-phosphate
  modified_base 9: mod_base = OTHER; note = 2'-deoxy-2'-fluoroguanosine-3'-phosphate
  modified_base 10: mod_base = OTHER; note = 2'-O-methylcytidine-3'-phosphate
  modified_base 11: mod_base = OTHER; note = 2'-O-methyluridine-3'-phosphate
  modified_base 12: mod_base = OTHER; note = 2'-O-methylcytidine-3'-phosphate
  modified_base 13: mod_base = OTHER; note = 2'-O-methyladenosine-3'-phosphate
  modified_base 14: mod_base = OTHER; note = 2'-deoxy-2'-fluorouridine-3'-phosphate
  modified_base 15: mod_base = OTHER; note = 2'-O-methylguanosine-3'-phosphate
  modified_base 16: mod_base = OTHER; note = 2'-deoxy-2'-fluorouridine-3'-phosphate
  modified_base 17: mod_base = OTHER; note = 2'-O-methyladenosine-3'-phosphate
  modified_base 18: mod_base = OTHER; note = 2'-O-methyluridine-3'-phosphate
  modified_base 19: mod_base = OTHER; note = 2'-O-methylcytidine-3'-phosphate
  modified_base 20: mod_base = OTHER; note = 2'-O-methylcytidine-3'-phosphate
  modified_base 21: mod_base = OTHER; note = 2'-O-methyladenosine-3'-phosphorothioate
  modified_base 22: mod_base = OTHER; note = 2'-O-methylcytidine-3'-phosphorothioate
  modified_base 23: mod_base = OTHER; note = 2'-O-methylcytidine
taaatcttgctcatgtatccacc

SEQ ID NO: 1715 - RNA, 23 nt, synthetic construct
  source 1..23: mol_type = other RNA
  modified_base 1: mod_base = OTHER; note = 2'-O-methyluridine-3'-phosphorothioate
  modified_base 2: mod_base = OTHER; note = 2'-deoxy-2'-fluoroadenosine-3'-phosphorothioate
  modified_base 3: mod_base = OTHER; note = 2'-O-methylguanosine-3'-phosphate
  modified_base 4: mod_base = OTHER; note = 2'-O-methyladenosine-3'-phosphate
  modified_base 5: mod_base = OTHER; note = 2'-O-methylcytidine-3'-phosphate
  modified_base 6: mod_base = OTHER; note = 2'-deoxy-2'-fluorouridine-3'-phosphate
  modified_base 7: mod_base = OTHER; note = 2'-O-methylcytidine-3'-phosphate
  modified_base 8: mod_base = OTHER; note = 2'-deoxy-2'-fluoroguanosine-3'-phosphate
  modified_base 9: mod_base = OTHER; note = 2'-deoxy-2'-fluorocytidine-3'-phosphate
  modified_base 10: mod_base = OTHER; note = 2'-O-methylcytidine-3'-phosphate
  modified_base 11: mod_base = OTHER; note = 2'-O-methyluridine-3'-phosphate
  modified_base 12: mod_base = OTHER; note = 2'-O-methylcytidine-3'-phosphate
  modified_base 13: mod_base = OTHER; note = 2'-O-methylcytidine-3'-phosphate
  modified_base 14: mod_base = OTHER; note = 2'-deoxy-2'-fluorouridine-3'-phosphate
  modified_base 15: mod_base = OTHER; note = 2'-O-methylcytidine-3'-phosphate
  modified_base 16: mod_base = OTHER; note = 2'-deoxy-2'-fluoroadenosine-3'-phosphate
  modified_base 17: mod_base = OTHER; note = 2'-O-methyladenosine-3'-phosphate
  modified_base 18: mod_base = OTHER; note = 2'-O-methylguanosine-3'-phosphate
  modified_base 19: mod_base = OTHER; note = 2'-O-methyluridine-3'-phosphate
  modified_base 20: mod_base = OTHER; note = 2'-O-methylguanosine-3'-phosphate
  modified_base 21: mod_base = OTHER; note = 2'-O-methyladenosine-3'-phosphorothioate
  modified_base 22: mod_base = OTHER; note = 2'-O-methylcytidine-3'-phosphorothioate
  modified_base 23: mod_base = OTHER; note = 2'-O-methyluridine
tagactcgcctcctcaagtgact

SEQ ID NO: 1716 - RNA, 23 nt, synthetic construct
  source 1..23: mol_type = other RNA
  modified_base 1: mod_base = OTHER; note = 2'-O-methyluridine-3'-phosphorothioate
  modified_base 2: mod_base = OTHER; note = 2'-deoxy-2'-fluoroadenosine-3'-phosphorothioate
  modified_base 3: mod_base = OTHER; note = 2'-O-methyladenosine-3'-phosphate
  modified_base 4: mod_base = OTHER; note = 2'-O-methylguanosine-3'-phosphate
  modified_base 5: mod_base = OTHER; note = 2'-O-methylguanosine-3'-phosphate
  modified_base 6: mod_base = OTHER; note = 2'-deoxy-2'-fluorocytidine-3'-phosphate
  modified_base 7: mod_base = OTHER; note = 2'-O-methyluridine-3'-phosphate
  modified_base 8: mod_base = OTHER; note = 2'-deoxy-2'-fluorouridine-3'-phosphate
  modified_base 9: mod_base = OTHER; note = 2'-deoxy-2'-fluoroadenosine-3'-phosphate
  modified_base 10: mod_base = OTHER; note = 2'-O-methyluridine-3'-phosphate
  modified_base 11: mod_base = OTHER; note = 2'-O-methyluridine-3'-phosphate
  modified_base 12: mod_base = OTHER; note = 2'-O-methylcytidine-3'-phosphate
  modified_base 13: mod_base = OTHER; note = 2'-O-methyluridine-3'-phosphate
  modified_base 14: mod_base = OTHER; note = 2'-deoxy-2'-fluoroadenosine-3'-phosphate
  modified_base 15: mod_base = OTHER; note = 2'-O-methylcytidine-3'-phosphate
  modified_base 16: mod_base = OTHER; note = 2'-deoxy-2'-fluorouridine-3'-phosphate
  modified_base 17: mod_base = OTHER; note = 2'-O-methyladenosine-3'-phosphate
  modified_base 18: mod_base = OTHER; note = 2'-O-methyladenosine-3'-phosphate
  modified_base 19: mod_base = OTHER; note = 2'-O-methylcytidine-3'-phosphate
  modified_base 20: mod_base = OTHER; note = 2'-O-methyladenosine-3'-phosphate
  modified_base 21: mod_base = OTHER; note = 2'-O-methyluridine-3'-phosphorothioate
  modified_base 22: mod_base = OTHER; note = 2'-O-methylcytidine-3'-phosphorothioate
  modified_base 23: mod_base = OTHER; note = 2'-O-methyluridine
taaggcttattctactaacatct

SEQ ID NO: 1717 - RNA, 23 nt, synthetic construct
  source 1..23: mol_type = other RNA
  modified_base 1: mod_base = OTHER; note = 2'-O-methyluridine-3'-phosphorothioate
  modified_base 2: mod_base = OTHER; note = 2'-deoxy-2'-fluorocytidine-3'-phosphorothioate
  modified_base 3: mod_base = OTHER; note = 2'-O-methyluridine-3'-phosphate
  modified_base 4: mod_base = OTHER; note = 2'-O-methyladenosine-3'-phosphate
  modified_base 5: mod_base = OTHER; note = 2'-O-methylguanosine-3'-phosphate
  modified_base 6: mod_base = OTHER; note = 2'-deoxy-2'-fluorocytidine-3'-phosphate
  modified_base 7: mod_base = OTHER; note = 2'-O-methyluridine-3'-phosphate
  modified_base 8: mod_base = OTHER; note = 2'-deoxy-2'-fluorouridine-3'-phosphate
  modified_base 9: mod_base = OTHER; note = 2'-deoxy-2'-fluorouridine-3'-phosphate
  modified_base 10: mod_base = OTHER; note = 2'-O-methyluridine-3'-phosphate
  modified_base 11: mod_base = OTHER; note = 2'-O-methylcytidine-3'-phosphate
  modified_base 12: mod_base = OTHER; note = 2'-O-methyladenosine-3'-phosphate
  modified_base 13: mod_base = OTHER; note = 2'-O-methyluridine-3'-phosphate
  modified_base 14: mod_base = OTHER; note = 2'-deoxy-2'-fluoroadenosine-3'-phosphate
  modified_base 15: mod_base = OTHER; note = 2'-O-methyladenosine-3'-phosphate
  modified_base 16: mod_base = OTHER; note = 2'-deoxy-2'-fluoroadenosine-3'-phosphate
  modified_base 17: mod_base = OTHER; note = 2'-O-methyladenosine-3'-phosphate
  modified_base 18: mod_base = OTHER; note = 2'-O-methylcytidine-3'-phosphate
  modified_base 19: mod_base = OTHER; note = 2'-O-methylcytidine-3'-phosphate
  modified_base 20: mod_base = OTHER; note = 2'-O-methyladenosine-3'-phosphate
  modified_base 21: mod_base = OTHER; note = 2'-O-methyladenosine-3'-phosphorothioate
  modified_base 22: mod_base = OTHER; note = 2'-O-methylcytidine-3'-phosphorothioate
  modified_base 23: mod_base = OTHER; note = 2'-O-methyluridine
tctagcttttcataaaaccaact

SEQ ID NO: 1718 - RNA, 23 nt, synthetic construct
  source 1..23: mol_type = other RNA
  modified_base 1: mod_base = OTHER; note = 2'-O-methyluridine-3'-phosphorothioate
  modified_base 2: mod_base = OTHER; note = 2'-deoxy-2'-fluoroadenosine-3'-phosphorothioate
  modified_base 3: mod_base = OTHER; note = 2'-O-methyladenosine-3'-phosphate
  modified_base 4: mod_base = OTHER; note = 2'-O-methylguanosine-3'-phosphate
  modified_base 5: mod_base = OTHER; note = 2'-O-methylguanosine-3'-phosphate
  modified_base 6: mod_base = OTHER; note = 2'-deoxy-2'-fluorouridine-3'-phosphate
  modified_base 7: mod_base = OTHER; note = 2'-O-methyladenosine-3'-phosphate
  modified_base 8: mod_base = OTHER; note = 2'-deoxy-2'-fluoroguanosine-3'-phosphate
  modified_base 9: mod_base = OTHER; note = 2'-deoxy-2'-fluoroadenosine-3'-phosphate
  modified_base 10: mod_base = OTHER; note = 2'-O-methylguanosine-3'-phosphate
  modified_base 11: mod_base = OTHER; note = 2'-O-methylguanosine-3'-phosphate
  modified_base 12: mod_base = OTHER; note = 2'-O-methyluridine-3'-phosphate
  modified_base 13: mod_base = OTHER; note = 2'-O-methyluridine-3'-phosphate
  modified_base 14: mod_base = OTHER; note = 2'-deoxy-2'-fluorocytidine-3'-phosphate
  modified_base 15: mod_base = OTHER; note = 2'-O-methylcytidine-3'-phosphate
  modified_base 16: mod_base = OTHER; note = 2'-deoxy-2'-fluorocytidine-3'-phosphate
  modified_base 17: mod_base = OTHER; note = 2'-O-methyluridine-3'-phosphate
  modified_base 18: mod_base = OTHER; note = 2'-O-methylguanosine-3'-phosphate
  modified_base 19: mod_base = OTHER; note = 2'-O-methyluridine-3'-phosphate
  modified_base 20: mod_base = OTHER; note = 2'-O-methylguanosine-3'-phosphate
  modified_base 21: mod_base = OTHER; note = 2'-O-methylcytidine-3'-phosphorothioate
  modified_base 22: mod_base = OTHER; note = 2'-O-methyladenosine-3'-phosphorothioate
  modified_base 23: mod_base = OTHER; note = 2'-O-methylguanosine
taaggtagaggttccctgtgcag

SEQ ID NO: 1719 - RNA, 23 nt, synthetic construct
  source 1..23: mol_type = other RNA
  modified_base 1: mod_base = OTHER; note = 2'-O-methyluridine-3'-phosphorothioate
  modified_base 2: mod_base = OTHER; note = 2'-deoxy-2'-fluoroadenosine-3'-phosphorothioate
  modified_base 3: mod_base = OTHER; note = 2'-O-methyluridine-3'-phosphate
  modified_base 4: mod_base = OTHER; note = 2'-O-methylcytidine-3'-phosphate
  modified_base 5: mod_base = OTHER; note = 2'-O-methyluridine-3'-phosphate
  modified_base 6: mod_base = OTHER; note = 2'-deoxy-2'-fluoroguanosine-3'-phosphate
  modified_base 7: mod_base = OTHER; note = 2'-O-methylguanosine-3'-phosphate
  modified_base 8: mod_base = OTHER; note = 2'-deoxy-2'-fluoroadenosine-3'-phosphate
  modified_base 9: mod_base = OTHER; note = 2'-deoxy-2'-fluoroadenosine-3'-phosphate
  modified_base 10: mod_base = OTHER; note = 2'-O-methylguanosine-3'-phosphate
  modified_base 11: mod_base = OTHER; note = 2'-O-methylcytidine-3'-phosphate
  modified_base 12: mod_base = OTHER; note = 2'-O-methylcytidine-3'-phosphate
  modified_base 13: mod_base = OTHER; note = 2'-O-methyladenosine-3'-phosphate
  modified_base 14: mod_base = OTHER; note = 2'-deoxy-2'-fluorouridine-3'-phosphate
  modified_base 15: mod_base = OTHER; note = 2'-O-methylguanosine-3'-phosphate
  modified_base 16: mod_base = OTHER; note = 2'-deoxy-2'-fluorouridine-3'-phosphate
  modified_base 17: mod_base = OTHER; note = 2'-O-methylcytidine-3'-phosphate
  modified_base 18: mod_base = OTHER; note = 2'-O-methyladenosine-3'-phosphate
  modified_base 19: mod_base = OTHER; note = 2'-O-methylcytidine-3'-phosphate
  modified_base 20: mod_base = OTHER; note = 2'-O-methylcytidine-3'-phosphate
  modified_base 21: mod_base = OTHER; note = 2'-O-methyladenosine-3'-phosphorothioate
  modified_base 22: mod_base = OTHER; note = 2'-O-methylguanosine-3'-phosphorothioate
  modified_base 23: mod_base = OTHER; note = 2'-O-methyluridine
tatctggaagccatgtcaccagt

SEQ ID NO: 1720 - RNA, 23 nt, synthetic construct
  source 1..23: mol_type = other RNA
  modified_base 1: mod_base = OTHER; note = 2'-O-methyladenosine-3'-phosphorothioate
  modified_base 2: mod_base = OTHER; note = 2'-deoxy-2'-fluoroadenosine-3'-phosphorothioate
  modified_base 3: mod_base = OTHER; note = 2'-O-methyluridine-3'-phosphate
  modified_base 4: mod_base = OTHER; note = 2'-O-methyladenosine-3'-phosphate
  modified_base 5: mod_base = OTHER; note = 2'-O-methylcytidine-3'-phosphate
  modified_base 6: mod_base = OTHER; note = 2'-deoxy-2'-fluoroadenosine-3'-phosphate
  modified_base 7: mod_base = OTHER; note = 2'-O-methyladenosine-3'-phosphate
  modified_base 8: mod_base = OTHER; note = 2'-deoxy-2'-fluoroadenosine-3'-phosphate
  modified_base 9: mod_base = OTHER; note = 2'-deoxy-2'-fluoroadenosine-3'-phosphate
  modified_base 10: mod_base = OTHER; note = 2'-O-methyluridine-3'-phosphate
  modified_base 11: mod_base = OTHER; note = 2'-O-methyluridine-3'-phosphate
  modified_base 12: mod_base = OTHER; note = 2'-O-methylcytidine-3'-phosphate
  modified_base 13: mod_base = OTHER; note = 2'-O-methyladenosine-3'-phosphate
  modified_base 14: mod_base = OTHER; note = 2'-deoxy-2'-fluoroadenosine-3'-phosphate
  modified_base 15: mod_base = OTHER; note = 2'-O-methylcytidine-3'-phosphate
  modified_base 16: mod_base = OTHER; note = 2'-deoxy-2'-fluoroadenosine-3'-phosphate
  modified_base 17: mod_base = OTHER; note = 2'-O-methylguanosine-3'-phosphate
  modified_base 18: mod_base = OTHER; note = 2'-O-methylguanosine-3'-phosphate
  modified_base 19: mod_base = OTHER; note = 2'-O-methyluridine-3'-phosphate
  modified_base 20: mod_base = OTHER; note = 2'-O-methyladenosine-3'-phosphate
  modified_base 21: mod_base = OTHER; note = 2'-O-methyladenosine-3'-phosphorothioate
  modified_base 22: mod_base = OTHER; note = 2'-O-methylcytidine-3'-phosphorothioate
  modified_base 23: mod_base = OTHER; note = 2'-O-methyladenosine
aatacaaaattcaacaggtaaca

SEQ ID NO: 1721 - RNA, 23 nt, synthetic construct
  source 1..23: mol_type = other RNA
  modified_base 1: mod_base = OTHER; note = 2'-O-methyluridine-3'-phosphorothioate
  modified_base 2: mod_base = OTHER; note = 2'-deoxy-2'-fluorouridine-3'-phosphorothioate
  modified_base 3: mod_base = OTHER; note = 2'-O-methylguanosine-3'-phosphate
  modified_base 4: mod_base = OTHER; note = 2'-O-methyladenosine-3'-phosphate
  modified_base 5: mod_base = OTHER; note = 2'-O-methylcytidine-3'-phosphate
  modified_base 6: mod_base = OTHER; note = 2'-deoxy-2'-fluorouridine-3'-phosphate
  modified_base 7: mod_base = OTHER; note = 2'-O-methyluridine-3'-phosphate
  modified_base 8: mod_base = OTHER; note = 2'-deoxy-2'-fluorouridine-3'-phosphate
  modified_base 9: mod_base = OTHER; note = 2'-deoxy-2'-fluoroadenosine-3'-phosphate
  modified_base 10: mod_base = OTHER; note = 2'-O-methylguanosine-3'-phosphate
  modified_base 11: mod_base = OTHER; note = 2'-O-methylguanosine-3'-phosphate
  modified_base 12: mod_base = OTHER; note = 2'-O-methylguanosine-3'-phosphate
  modified_base 13: mod_base = OTHER; note = 2'-O-methylcytidine-3'-phosphate
  modified_base 14: mod_base = OTHER; note = 2'-deoxy-2'-fluoroadenosine-3'-phosphate
  modified_base 15: mod_base = OTHER; note = 2'-O-methylguanosine-3'-phosphate
  modified_base 16: mod_base = OTHER; note = 2'-deoxy-2'-fluoroadenosine-3'-phosphate
  modified_base 17: mod_base = OTHER; note = 2'-O-methyluridine-3'-phosphate
  modified_base 18: mod_base = OTHER; note = 2'-O-methylguanosine-3'-phosphate
  modified_base 19: mod_base = OTHER; note = 2'-O-methyluridine-3'-phosphate
  modified_base 20: mod_base = OTHER; note = 2'-O-methylcytidine-3'-phosphate
  modified_base 21: mod_base = OTHER; note = 2'-O-methylguanosine-3'-phosphorothioate
  modified_base 22: mod_base = OTHER; note = 2'-O-methyluridine-3'-phosphorothioate
  modified_base 23: mod_base = OTHER; note = 2'-O-methyladenosine
ttgactttagggcagatgtcgta

SEQ ID NO: 1722 - RNA, 23 nt, synthetic construct
  source 1..23: mol_type = other RNA
  modified_base 1: mod_base = OTHER; note = 2'-O-methyluridine-3'-phosphorothioate
  modified_base 2: mod_base = OTHER; note = 2'-deoxy-2'-fluoroadenosine-3'-phosphorothioate
  modified_base 3: mod_base = OTHER; note = 2'-O-methyladenosine-3'-phosphate
  modified_base 4: mod_base = OTHER; note = 2'-O-methylguanosine-3'-phosphate
  modified_base 5: mod_base = OTHER; note = 2'-O-methylguanosine-3'-phosphate
  modified_base 6: mod_base = OTHER; note = 2'-deoxy-2'-fluoroguanosine-3'-phosphate
  modified_base 7: mod_base = OTHER; note = 2'-O-methyluridine-3'-phosphate
  modified_base 8: mod_base = OTHER; note = 2'-deoxy-2'-fluoroadenosine-3'-phosphate
  modified_base 9: mod_base = OTHER; note = 2'-deoxy-2'-fluorocytidine-3'-phosphate
  modified_base 10: mod_base = OTHER; note = 2'-O-methylguanosine-3'-phosphate
  modified_base 11: mod_base = OTHER; note = 2'-O-methyluridine-3'-phosphate
  modified_base 12: mod_base = OTHER; note = 2'-O-methyluridine-3'-phosphate
  modified_base 13: mod_base = OTHER; note = 2'-O-methylguanosine-3'-phosphate
  modified_base 14: mod_base = OTHER; note = 2'-deoxy-2'-fluorouridine-3'-phosphate
  modified_base 15: mod_base = OTHER; note = 2'-O-methylcytidine-3'-phosphate
  modified_base 16: mod_base = OTHER; note = 2'-deoxy-2'-fluoroadenosine-3'-phosphate
  modified_base 17: mod_base = OTHER; note = 2'-O-methylcytidine-3'-phosphate
  modified_base 18: mod_base = OTHER; note = 2'-O-methyluridine-3'-phosphate
  modified_base 19: mod_base = OTHER; note = 2'-O-methylcytidine-3'-phosphate
  modified_base 20: mod_base = OTHER; note = 2'-O-methyladenosine-3'-phosphate
  modified_base 21: mod_base = OTHER; note = 2'-O-methylcytidine-3'-phosphorothioate
  modified_base 22: mod_base = OTHER; note = 2'-O-methyluridine-3'-phosphorothioate
  modified_base 23: mod_base = OTHER; note = 2'-O-methylcytidine
taagggtacgttgtcactcactc

SEQ ID NO: 1723 - RNA, 23 nt, synthetic construct
  source 1..23: mol_type = other RNA
  modified_base 1: mod_base = OTHER; note = 2'-O-methyladenosine-3'-phosphorothioate
  modified_base 2: mod_base = OTHER; note = 2'-deoxy-2'-fluoroadenosine-3'-phosphorothioate
  modified_base 3: mod_base = OTHER; note = 2'-O-methyladenosine-3'-phosphate
  modified_base 4: mod_base = OTHER; note = 2'-O-methylguanosine-3'-phosphate
  modified_base 5: mod_base = OTHER; note = 2'-O-methyladenosine-3'-phosphate
  modified_base 6: mod_base = OTHER; note = 2'-deoxy-2'-fluorouridine-3'-phosphate
  modified_base 7: mod_base = OTHER; note = 2'-O-methylguanosine-3'-phosphate
  modified_base 8: mod_base = OTHER; note = 2'-deoxy-2'-fluoroguanosine-3'-phosphate
  modified_base 9: mod_base = OTHER; note = 2'-deoxy-2'-fluoroguanosine-3'-phosphate
  modified_base 10: mod_base = OTHER; note = 2'-O-methyladenosine-3'-phosphate
  modified_base 11: mod_base = OTHER; note = 2'-O-methyladenosine-3'-phosphate
  modified_base 12: mod_base = OTHER; note = 2'-O-methyladenosine-3'-phosphate
  modified_base 13: mod_base = OTHER; note = 2'-O-methylcytidine-3'-phosphate
  modified_base 14: mod_base = OTHER; note = 2'-deoxy-2'-fluorouridine-3'-phosphate
  modified_base 15: mod_base = OTHER; note = 2'-O-methyluridine-3'-phosphate
  modified_base 16: mod_base = OTHER; note = 2'-deoxy-2'-fluorouridine-3'-phosphate
  modified_base 17: mod_base = OTHER; note = 2'-O-methyladenosine-3'-phosphate
  modified_base 18: mod_base = OTHER; note = 2'-O-methylguanosine-3'-phosphate
  modified_base 19: mod_base = OTHER; note = 2'-O-methylcytidine-3'-phosphate
  modified_base 20: mod_base = OTHER; note = 2'-O-methyladenosine-3'-phosphate
  modified_base 21: mod_base = OTHER; note = 2'-O-methylcytidine-3'-phosphorothioate
  modified_base 22: mod_base = OTHER; note = 2'-O-methylcytidine-3'-phosphorothioate
  modified_base 23: mod_base = OTHER; note = 2'-O-methyluridine
aaagatgggaaactttagcacct

SEQ ID NO: 1724 - RNA, 23 nt, synthetic construct
  source 1..23: mol_type = other RNA
  modified_base 1: mod_base = OTHER; note = 2'-O-methyluridine-3'-phosphorothioate
  modified_base 2: mod_base = OTHER; note = 2'-deoxy-2'-fluoroguanosine-3'-phosphorothioate
  modified_base 3: mod_base = OTHER; note = 2'-O-methyluridine-3'-phosphate
  modified_base 4: mod_base = OTHER; note = 2'-O-methyladenosine-3'-phosphate
  modified_base 5: mod_base = OTHER; note = 2'-O-methylguanosine-3'-phosphate
  modified_base 6: mod_base = OTHER; note = 2'-deoxy-2'-fluorocytidine-3'-phosphate
  modified_base 7: mod_base = OTHER; note = 2'-O-methyladenosine-3'-phosphate
  modified_base 8: mod_base = OTHER; note = 2'-deoxy-2'-fluoroadenosine-3'-phosphate
  modified_base 9: mod_base = OTHER; note = 2'-deoxy-2'-fluoroguanosine-3'-phosphate
  modified_base 10: mod_base = OTHER; note = 2'-O-methyluridine-3'-phosphate
  modified_base 11: mod_base = OTHER; note = 2'-O-methyluridine-3'-phosphate
  modified_base 12: mod_base = OTHER; note = 2'-O-methylguanosine-3'-phosphate
  modified_base 13: mod_base = OTHER; note = 2'-O-methylcytidine-3'-phosphate
  modified_base 14: mod_base = OTHER; note = 2'-deoxy-2'-fluoroadenosine-3'-phosphate
  modified_base 15: mod_base = OTHER; note = 2'-O-methyladenosine-3'-phosphate
  modified_base 16: mod_base = OTHER; note = 2'-deoxy-2'-fluoroadenosine-3'-phosphate
  modified_base 17: mod_base = OTHER; note = 2'-O-methyluridine-3'-phosphate
  modified_base 18: mod_base = OTHER; note = 2'-O-methylcytidine-3'-phosphate
  modified_base 19: mod_base = OTHER; note = 2'-O-methyluridine-3'-phosphate
  modified_base 20: mod_base = OTHER; note = 2'-O-methyluridine-3'-phosphate
  modified_base 21: mod_base = OTHER; note = 2'-O-methylguanosine-3'-phosphorothioate
  modified_base 22: mod_base = OTHER; note = 2'-O-methylcytidine-3'-phosphorothioate
  modified_base 23: mod_base = OTHER; note = 2'-O-methyluridine
tgtagcaagttgcaaatcttgct

SEQ ID NO: 1725 - RNA, 23 nt, synthetic construct
  source 1..23: mol_type = other RNA
  modified_base 1: mod_base = OTHER; note = 2'-O-methyluridine-3'-phosphorothioate
  modified_base 2: mod_base = OTHER; note = 2'-deoxy-2'-fluorouridine-3'-phosphorothioate
  modified_base 3: mod_base = OTHER; note = 2'-O-methyladenosine-3'-phosphate
  modified_base 4: mod_base = OTHER; note = 2'-O-methyladenosine-3'-phosphate
  modified_base 5: mod_base = OTHER; note = 2'-O-methyladenosine-3'-phosphate
  modified_base 6: mod_base = OTHER; note = 2'-deoxy-2'-fluorocytidine-3'-phosphate
  modified_base 7: mod_base = OTHER; note = 2'-O-methyladenosine-3'-phosphate
  modified_base 8: mod_base = OTHER; note = 2'-deoxy-2'-fluorouridine-3'-phosphate
  modified_base 9: mod_base = OTHER; note = 2'-deoxy-2'-fluorouridine-3'-phosphate
  modified_base 10: mod_base = OTHER; note = 2'-O-methyladenosine-3'-phosphate
  modified_base 11: mod_base = OTHER; note = 2'-O-methyluridine-3'-phosphate
  modified_base 12: mod_base = OTHER; note = 2'-O-methyluridine-3'-phosphate
  modified_base 13: mod_base = OTHER; note = 2'-O-methyluridine-3'-phosphate
  modified_base 14: mod_base = OTHER; note = 2'-deoxy-2'-fluorouridine-3'-phosphate
  modified_base 15: mod_base = OTHER; note = 2'-O-methyladenosine-3'-phosphate
  modified_base 16: mod_base = OTHER; note = 2'-deoxy-2'-fluoroguanosine-3'-phosphate
  modified_base 17: mod_base = OTHER; note = 2'-O-methyluridine-3'-phosphate
  modified_base 18: mod_base = OTHER; note = 2'-O-methyluridine-3'-phosphate
  modified_base 19: mod_base = OTHER; note = 2'-O-methyladenosine-3'-phosphate
  modified_base 20: mod_base = OTHER; note = 2'-O-methylguanosine-3'-phosphate
  modified_base 21: mod_base = OTHER; note = 2'-O-methylguanosine-3'-phosphorothioate
  modified_base 22: mod_base = OTHER; note = 2'-O-methyluridine-3'-phosphorothioate
  modified_base 23: mod_base = OTHER; note = 2'-O-methylguanosine
ttaaacattattttagttaggtg

SEQ ID NO: 1726 - RNA, 23 nt, synthetic construct
  source 1..23: mol_type = other RNA
  modified_base 1: mod_base = OTHER; note = 2'-O-methyluridine-3'-phosphorothioate
  modified_base 2: mod_base = OTHER; note = 2'-deoxy-2'-fluorouridine-3'-phosphorothioate
  modified_base 3: mod_base = OTHER; note = 2'-O-methylcytidine-3'-phosphate
  modified_base 4: mod_base = OTHER; note = 2'-O-methylguanosine-3'-phosphate
  modified_base 5: mod_base = OTHER; note = 2'-O-methyladenosine-3'-phosphate
  modified_base 6: mod_base = OTHER; note = 2'-deoxy-2'-fluoroadenosine-3'-phosphate
  modified_base 7: mod_base = OTHER; note = 2'-O-methylguanosine-3'-phosphate
  modified_base 8: mod_base = OTHER; note = 2'-deoxy-2'-fluoroguanosine-3'-phosphate
  modified_base 9: mod_base = OTHER; note = 2'-deoxy-2'-fluorocytidine-3'-phosphate
  modified_base 10: mod_base = OTHER; note = 2'-O-methyladenosine-3'-phosphate
  modified_base 11: mod_base = OTHER; note = 2'-O-methyluridine-3'-phosphate
  modified_base 12: mod_base = OTHER; note = 2'-O-methyladenosine-3'-phosphate
  modified_base 13: mod_base = OTHER; note = 2'-O-methyluridine-3'-phosphate
  modified_base 14: mod_base = OTHER; note = 2'-deoxy-2'-fluorocytidine-3'-phosphate
  modified_base 15: mod_base = OTHER; note = 2'-O-methyluridine-3'-phosphate
  modified_base 16: mod_base = OTHER; note = 2'-deoxy-2'-fluorocytidine-3'-phosphate
  modified_base 17: mod_base = OTHER; note = 2'-O-methyluridine-3'-phosphate
  modified_base 18: mod_base = OTHER; note = 2'-O-methylcytidine-3'-phosphate
  modified_base 19: mod_base = OTHER; note = 2'-O-methylcytidine-3'-phosphate
  modified_base 20: mod_base = OTHER; note = 2'-O-methylcytidine-3'-phosphate
  modified_base 21: mod_base = OTHER; note = 2'-O-methyladenosine-3'-phosphorothioate
  modified_base 22: mod_base = OTHER; note = 2'-O-methylguanosine-3'-phosphorothioate
  modified_base 23: mod_base = OTHER; note = 2'-O-methylcytidine
ttcgaaggcatatctctcccagc

SEQ ID NO: 1727 - RNA, 23 nt, synthetic construct
  source 1..23: mol_type = other RNA
  modified_base 1: mod_base = OTHER; note = 2'-O-methyluridine-3'-phosphorothioate
  modified_base 2: mod_base = OTHER; note = 2'-deoxy-2'-fluoroadenosine-3'-phosphorothioate
  modified_base 3: mod_base = OTHER; note = 2'-O-methyluridine-3'-phosphate
  modified_base 4: mod_base = OTHER; note = 2'-O-methylcytidine-3'-phosphate
  modified_base 5: mod_base = OTHER; note = 2'-O-methylcytidine-3'-phosphate
  modified_base 6: mod_base = OTHER; note = 2'-deoxy-2'-fluorouridine-3'-phosphate
  modified_base 7: mod_base = OTHER; note = 2'-O-methyladenosine-3'-phosphate
  modified_base 8: mod_base = OTHER; note = 2'-deoxy-2'-fluoroadenosine-3'-phosphate
  modified_base 9: mod_base = OTHER; note = 2'-deoxy-2'-fluorouridine-3'-phosphate
  modified_base 10: mod_base = OTHER; note = 2'-O-methylguanosine-3'-phosphate
  modified_base 11: mod_base = OTHER; note = 2'-O-methylguanosine-3'-phosphate
  modified_base 12: mod_base = OTHER; note = 2'-O-methylguanosine-3'-phosphate
  modified_base 13: mod_base = OTHER; note = 2'-O-methyluridine-3'-phosphate
  modified_base 14: mod_base = OTHER; note = 2'-deoxy-2'-fluoroadenosine-3'-phosphate
  modified_base 15: mod_base = OTHER; note = 2'-O-methylguanosine-3'-phosphate
  modified_base 16: mod_base = OTHER; note = 2'-deoxy-2'-fluorocytidine-3'-phosphate
  modified_base 17: mod_base = OTHER; note = 2'-O-methyladenosine-3'-phosphate
  modified_base 18: mod_base = OTHER; note = 2'-O-methyladenosine-3'-phosphate
  modified_base 19: mod_base = OTHER; note = 2'-O-methylguanosine-3'-phosphate
  modified_base 20: mod_base = OTHER; note = 2'-O-methyluridine-3'-phosphate
  modified_base 21: mod_base = OTHER; note = 2'-O-methyluridine-3'-phosphorothioate
  modified_base 22: mod_base = OTHER; note = 2'-O-methylguanosine-3'-phosphorothioate
  modified_base 23: mod_base = OTHER; note = 2'-O-methylcytidine
tatcctaatgggtagcaagttgc

SEQ ID NO: 1728 - RNA, 23 nt, synthetic construct
  source 1..23: mol_type = other RNA
  modified_base 1: mod_base = OTHER; note = 2'-O-methyladenosine-3'-phosphorothioate
  modified_base 2: mod_base = OTHER; note = 2'-deoxy-2'-fluorouridine-3'-phosphorothioate
  modified_base 3: mod_base = OTHER; note = 2'-O-methyladenosine-3'-phosphate
  modified_base 4: mod_base = OTHER; note = 2'-O-methyladenosine-3'-phosphate
  modified_base 5: mod_base = OTHER; note = 2'-O-methyluridine-3'-phosphate
  modified_base 6: mod_base = OTHER; note = 2'-deoxy-2'-fluoroadenosine-3'-phosphate
  modified_base 7: mod_base = OTHER; note = 2'-O-methylcytidine-3'-phosphate
  modified_base 8: mod_base = OTHER; note = 2'-deoxy-2'-fluoroadenosine-3'-phosphate
  modified_base 9: mod_base = OTHER; note = 2'-deoxy-2'-fluoroadenosine-3'-phosphate
  modified_base 10: mod_base = OTHER; note = 2'-O-methyladenosine-3'-phosphate
  modified_base 11: mod_base = OTHER; note = 2'-O-methyladenosine-3'-phosphate
  modified_base 12: mod_base = OTHER; note = 2'-O-methyluridine-3'-phosphate
  modified_base 13: mod_base = OTHER; note = 2'-O-methyluridine-3'-phosphate
  modified_base 14: mod_base = OTHER; note = 2'-deoxy-2'-fluorocytidine-3'-phosphate
  modified_base 15: mod_base = OTHER; note = 2'-O-methyladenosine-3'-phosphate
  modified_base 16: mod_base = OTHER; note = 2'-deoxy-2'-fluoroadenosine-3'-phosphate
  modified_base 17: mod_base = OTHER; note = 2'-O-methylcytidine-3'-phosphate
  modified_base 18: mod_base = OTHER; note = 2'-O-methyladenosine-3'-phosphate
  modified_base 19: mod_base = OTHER; note = 2'-O-methylguanosine-3'-phosphate
  modified_base 20: mod_base = OTHER; note = 2'-O-methylguanosine-3'-phosphate
  modified_base 21: mod_base = OTHER; note = 2'-O-methyluridine-3'-phosphorothioate
  modified_base 22: mod_base = OTHER; note = 2'-O-methyladenosine-3'-phosphorothioate
  modified_base 23: mod_base = OTHER; note = 2'-O-methyladenosine
ataatacaaaattcaacaggtaa

SEQ ID NO: 1729 - RNA, 23 nt, synthetic construct
  source 1..23: mol_type = other RNA
  modified_base 1: mod_base = OTHER; note = 2'-O-methyladenosine-3'-phosphorothioate
  modified_base 2: mod_base = OTHER; note = 2'-deoxy-2'-fluorouridine-3'-phosphorothioate
  modified_base 3: mod_base = OTHER; note = 2'-O-methylcytidine-3'-phosphate
  modified_base 4: mod_base = OTHER; note = 2'-O-methylcytidine-3'-phosphate
  modified_base 5: mod_base = OTHER; note = 2'-O-methyladenosine-3'-phosphate
  modified_base 6: mod_base = OTHER; note = 2'-deoxy-2'-fluorocytidine-3'-phosphate
  modified_base 7: mod_base = OTHER; note = 2'-O-methylcytidine-3'-phosphate
  modified_base 8: mod_base = OTHER; note = 2'-deoxy-2'-fluorouridine-3'-phosphate
  modified_base 9: mod_base = OTHER; note = 2'-deoxy-2'-fluorouridine-3'-phosphate
  modified_base 10: mod_base = OTHER; note = 2'-O-methyluridine-3'-phosphate
  modified_base 11: mod_base = OTHER; note = 2'-O-methylguanosine-3'-phosphate
  modified_base 12: mod_base = OTHER; note = 2'-O-methyluridine-3'-phosphate
  modified_base 13: mod_base = OTHER; note = 2'-O-methylcytidine-3'-phosphate
  modified_base 14: mod_base = OTHER; note = 2'-deoxy-2'-fluorouridine-3'-phosphate
  modified_base 15: mod_base = OTHER; note = 2'-O-methyluridine-3'-phosphate
  modified_base 16: mod_base = OTHER; note = 2'-deoxy-2'-fluorouridine-3'-phosphate
  modified_base 17: mod_base = OTHER; note = 2'-O-methylcytidine-3'-phosphate
  modified_base 18: mod_base = OTHER; note = 2'-O-methyladenosine-3'-phosphate
  modified_base 19: mod_base = OTHER; note = 2'-O-methyluridine-3'-phosphate
  modified_base 20: mod_base = OTHER; note = 2'-O-methyluridine-3'-phosphate
  modified_base 21: mod_base = OTHER; note = 2'-O-methyluridine-3'-phosphorothioate
  modified_base 22: mod_base = OTHER; note = 2'-O-methylcytidine-3'-phosphorothioate
  modified_base 23: mod_base = OTHER; note = 2'-O-methyluridine
atccacctttgtctttcatttct

SEQ ID NO: 1730 - RNA, 23 nt, synthetic construct
  source 1..23: mol_type = other RNA
  modified_base 1: mod_base = OTHER; note = 2'-O-methyladenosine-3'-phosphorothioate
  modified_base 2: mod_base = OTHER; note = 2'-deoxy-2'-fluoroadenosine-3'-phosphorothioate
  modified_base 3: mod_base = OTHER; note = 2'-O-methylguanosine-3'-phosphate
  modified_base 4: mod_base = OTHER; note = 2'-O-methyluridine-3'-phosphate
  modified_base 5: mod_base = OTHER; note = 2'-O-methyluridine-3'-phosphate
  modified_base 6: mod_base = OTHER; note = 2'-deoxy-2'-fluoroguanosine-3'-phosphate
  modified_base 7: mod_base = OTHER; note = 2'-O-methylcytidine-3'-phosphate
  modified_base 8: mod_base = OTHER; note = 2'-deoxy-2'-fluoroadenosine-3'-phosphate
  modified_base 9: mod_base = OTHER; note = 2'-deoxy-2'-fluoroadenosine-3'-phosphate
  modified_base 10: mod_base = OTHER; note = 2'-O-methyladenosine-3'-phosphate
  modified_base 11: mod_base = OTHER; note = 2'-O-methyluridine-3'-phosphate
  modified_base 12: mod_base = OTHER; note = 2'-O-methylcytidine-3'-phosphate
  modified_base 13: mod_base = OTHER; note = 2'-O-methyluridine-3'-phosphate
  modified_base 14: mod_base = OTHER; note = 2'-deoxy-2'-fluorouridine-3'-phosphate
  modified_base 15: mod_base = OTHER; note = 2'-O-methylguanosine-3'-phosphate
  modified_base 16: mod_base = OTHER; note = 2'-deoxy-2'-fluorocytidine-3'-phosphate
  modified_base 17: mod_base = OTHER; note = 2'-O-methyluridine-3'-phosphate
  modified_base 18: mod_base = OTHER; note = 2'-O-methylcytidine-3'-phosphate
  modified_base 19: mod_base = OTHER; note = 2'-O-methyladenosine-3'-phosphate
  modified_base 20: mod_base = OTHER; note = 2'-O-methyluridine-3'-phosphate
  modified_base 21: mod_base = OTHER; note = 2'-O-methylguanosine-3'-phosphorothioate
  modified_base 22: mod_base = OTHER; note = 2'-O-methyluridine-3'-phosphorothioate
  modified_base 23: mod_base = OTHER; note = 2'-O-methyladenosine
aagttgcaaatcttgctcatgta

SEQ ID NO: 1731 - RNA, 23 nt, synthetic construct
  source 1..23: mol_type = other RNA
  modified_base 1: mod_base = OTHER; note = 2'-O-methyluridine-3'-phosphorothioate
  modified_base 2: mod_base = OTHER; note = 2'-deoxy-2'-fluoroguanosine-3'-phosphorothioate
  modified_base 3: mod_base = OTHER; note = 2'-O-methyluridine-3'-phosphate
  modified_base 4: mod_base = OTHER; note = 2'-O-methylcytidine-3'-phosphate
  modified_base 5: mod_base = OTHER; note = 2'-O-methyluridine-3'-phosphate
  modified_base 6: mod_base = OTHER; note = 2'-deoxy-2'-fluorouridine-3'-phosphate
  modified_base 7: mod_base = OTHER; note = 2'-O-methyluridine-3'-phosphate
  modified_base 8: mod_base = OTHER; note = 2'-deoxy-2'-fluorocytidine-3'-phosphate
  modified_base 9: mod_base = OTHER; note = 2'-deoxy-2'-fluoroadenosine-3'-phosphate
  modified_base 10: mod_base = OTHER; note = 2'-O-methyluridine-3'-phosphate
  modified_base 11: mod_base = OTHER; note = 2'-O-methyluridine-3'-phosphate
  modified_base 12: mod_base = OTHER; note = 2'-O-methyluridine-3'-phosphate
  modified_base 13: mod_base = OTHER; note = 2'-O-methylcytidine-3'-phosphate
  modified_base 14: mod_base = OTHER; note = 2'-deoxy-2'-fluorouridine-3'-phosphate
  modified_base 15: mod_base = OTHER; note = 2'-O-methyluridine-3'-phosphate
  modified_base 16: mod_base = OTHER; note = 2'-deoxy-2'-fluorocytidine-3'-phosphate
  modified_base 17: mod_base = OTHER; note = 2'-O-methyladenosine-3'-phosphate
  modified_base 18: mod_base = OTHER; note = 2'-O-methylcytidine-3'-phosphate
  modified_base 19: mod_base = OTHER; note = 2'-O-methyluridine-3'-phosphate
  modified_base 20: mod_base = OTHER; note = 2'-O-methylcytidine-3'-phosphate
  modified_base 21: mod_base = OTHER; note = 2'-O-methyladenosine-3'-phosphorothioate
  modified_base 22: mod_base = OTHER; note = 2'-O-methylguanosine-3'-phosphorothioate
  modified_base 23: mod_base = OTHER; note = 2'-O-methyluridine
tgtctttcatttcttcactcagt

SEQ ID NO: 1732 - RNA, 23 nt, synthetic construct
  source 1..23: mol_type = other RNA
  modified_base 1: mod_base = OTHER; note = 2'-O-methyluridine-3'-phosphorothioate
  modified_base 2: mod_base = OTHER; note = 2'-deoxy-2'-fluoroadenosine-3'-phosphorothioate
  modified_base 3: mod_base = OTHER; note = 2'-O-methyladenosine-3'-phosphate
  modified_base 4: mod_base = OTHER; note = 2'-O-methyluridine-3'-phosphate
  modified_base 5: mod_base = OTHER; note = 2'-O-methyladenosine-3'-phosphate
  modified_base 6: mod_base = OTHER; note = 2'-deoxy-2'-fluorocytidine-3'-phosphate
  modified_base 7: mod_base = OTHER; note = 2'-O-methyladenosine-3'-phosphate
  modified_base 8: mod_base = OTHER; note = 2'-deoxy-2'-fluoroadenosine-3'-phosphate
  modified_base 9: mod_base = OTHER; note = 2'-deoxy-2'-fluoroadenosine-3'-phosphate
  modified_base 10: mod_base = OTHER; note = 2'-O-methyladenosine-3'-phosphate
  modified_base 11: mod_base = OTHER; note = 2'-O-methyluridine-3'-phosphate
  modified_base 12: mod_base = OTHER; note = 2'-O-methyluridine-3'-phosphate
  modified_base 13: mod_base = OTHER; note = 2'-O-methylcytidine-3'-phosphate
  modified_base 14: mod_base = OTHER; note = 2'-deoxy-2'-fluoroadenosine-3'-phosphate
  modified_base 15: mod_base = OTHER; note = 2'-O-methyladenosine-3'-phosphate
  modified_base 16: mod_base = OTHER; note = 2'-deoxy-2'-fluorocytidine-3'-phosphate
  modified_base 17: mod_base = OTHER; note = 2'-O-methyladenosine-3'-phosphate
  modified_base 18: mod_base = OTHER; note = 2'-O-methylguanosine-3'-phosphate
  modified_base 19: mod_base = OTHER; note = 2'-O-methylguanosine-3'-phosphate
  modified_base 20: mod_base = OTHER; note = 2'-O-methyluridine-3'-phosphate
  modified_base 21: mod_base = OTHER; note = 2'-O-methyladenosine-3'-phosphorothioate
  modified_base 22: mod_base = OTHER; note = 2'-O-methyladenosine-3'-phosphorothioate
  modified_base 23: mod_base = OTHER; note = 2'-O-methylcytidine
taatacaaaattcaacaggtaac

SEQ ID NO: 1733 - RNA, 23 nt, synthetic construct
  source 1..23: mol_type = other RNA
  modified_base 1: mod_base = OTHER; note = 2'-O-methyluridine-3'-phosphorothioate
  modified_base 2: mod_base = OTHER; note = 2'-deoxy-2'-fluoroadenosine-3'-phosphorothioate
  modified_base 3: mod_base = OTHER; note = 2'-O-methyluridine-3'-phosphate
  modified_base 4: mod_base = OTHER; note = 2'-O-methyluridine-3'-phosphate
  modified_base 5: mod_base = OTHER; note = 2'-O-methyladenosine-3'-phosphate
  modified_base 6: mod_base = OTHER; note = 2'-deoxy-2'-fluorouridine-3'-phosphate
  modified_base 7: mod_base = OTHER; note = 2'-O-methylcytidine-3'-phosphate
  modified_base 8: mod_base = OTHER; note = 2'-deoxy-2'-fluorocytidine-3'-phosphate
  modified_base 9: mod_base = OTHER; note = 2'-deoxy-2'-fluorouridine-3'-phosphate
  modified_base 10: mod_base = OTHER; note = 2'-O-methyladenosine-3'-phosphate
  modified_base 11: mod_base = OTHER; note = 2'-O-methyladenosine-3'-phosphate
  modified_base 12: mod_base = OTHER; note = 2'-O-methyluridine-3'-phosphate
  modified_base 13: mod_base = OTHER; note = 2'-O-methylguanosine-3'-phosphate
  modified_base 14: mod_base = OTHER; note = 2'-deoxy-2'-fluoroguanosine-3'-phosphate
  modified_base 15: mod_base = OTHER; note = 2'-O-methylguanosine-3'-phosphate
  modified_base 16: mod_base = OTHER; note = 2'-deoxy-2'-fluorouridine-3'-phosphate
  modified_base 17: mod_base = OTHER; note = 2'-O-methyladenosine-3'-phosphate
  modified_base 18: mod_base = OTHER; note = 2'-O-methylguanosine-3'-phosphate
  modified_base 19: mod_base = OTHER; note = 2'-O-methylcytidine-3'-phosphate
  modified_base 20: mod_base = OTHER; note = 2'-O-methyladenosine-3'-phosphate
  modified_base 21: mod_base = OTHER; note = 2'-O-methyladenosine-3'-phosphorothioate
  modified_base 22: mod_base = OTHER; note = 2'-O-methylguanosine-3'-phosphorothioate
  modified_base 23: mod_base = OTHER; note = 2'-O-methyluridine
tattatcctaatgggtagcaagt

SEQ ID NO: 1734 - RNA, 23 nt, synthetic construct
  source 1..23: mol_type = other RNA
  modified_base 1: mod_base = OTHER; note = 2'-O-methyluridine-3'-phosphorothioate
  modified_base 2: mod_base = OTHER; note = 2'-deoxy-2'-fluorouridine-3'-phosphorothioate
  modified_base 3: mod_base = OTHER; note = 2'-O-methyladenosine-3'-phosphate
  modified_base 4: mod_base = OTHER; note = 2'-O-methylcytidine-3'-phosphate
  modified_base 5: mod_base = OTHER; note = 2'-O-methyladenosine-3'-phosphate
  modified_base 6: mod_base = OTHER; note = 2'-deoxy-2'-fluoroguanosine-3'-phosphate
  modified_base 7: mod_base = OTHER; note = 2'-O-methylguanosine-3'-phosphate
  modified_base 8: mod_base = OTHER; note = 2'-deoxy-2'-fluoroguanosine-3'-phosphate
  modified_base 9: mod_base = OTHER; note = 2'-deoxy-2'-fluorocytidine-3'-phosphate
  modified_base 10: mod_base = OTHER; note = 2'-O-methyladenosine-3'-phosphate
  modified_base 11: mod_base = OTHER; note = 2'-O-methylguanosine-3'-phosphate
  modified_base 12: mod_base = OTHER; note = 2'-O-methylcytidine-3'-phosphate
  modified_base 13: mod_base = OTHER; note = 2'-O-methyladenosine-3'-phosphate
  modified_base 14: mod_base = OTHER; note = 2'-deoxy-2'-fluorouridine-3'-phosphate
  modified_base 15: mod_base = OTHER; note = 2'-O-methyluridine-3'-phosphate
  modified_base 16: mod_base = OTHER; note = 2'-deoxy-2'-fluoroadenosine-3'-phosphate
  modified_base 17: mod_base = OTHER; note = 2'-O-methylcytidine-3'-phosphate
  modified_base 18: mod_base = OTHER; note = 2'-O-methyladenosine-3'-phosphate
  modified_base 19: mod_base = OTHER; note = 2'-O-methyluridine-3'-phosphate
  modified_base 20: mod_base = OTHER; note = 2'-O-methyladenosine-3'-phosphate
  modified_base 21: mod_base = OTHER; note = 2'-O-methyladenosine-3'-phosphorothioate
  modified_base 22: mod_base = OTHER; note = 2'-O-methylguanosine-3'-phosphorothioate
  modified_base 23: mod_base = OTHER; note = 2'-O-methyladenosine
ttacagggcagcattacataaga

SEQ ID NO: 1735 - RNA, 23 nt, synthetic construct
  source 1..23: mol_type = other RNA
  modified_base 1: mod_base = OTHER; note = 2'-O-methyladenosine-3'-phosphorothioate
  modified_base 2: mod_base = OTHER; note = 2'-deoxy-2'-fluorouridine-3'-phosphorothioate
  modified_base 3: mod_base = OTHER; note = 2'-O-methylguanosine-3'-phosphate
  modified_base 4: mod_base = OTHER; note = 2'-O-methylguanosine-3'-phosphate
  modified_base 5: mod_base = OTHER; note = 2'-O-methylguanosine-3'-phosphate
  modified_base 6: mod_base = OTHER; note = 2'-deoxy-2'-fluorouridine-3'-phosphate
  modified_base 7: mod_base = OTHER; note = 2'-O-methyladenosine-3'-phosphate
  modified_base 8: mod_base = OTHER; note = 2'-deoxy-2'-fluoroguanosine-3'-phosphate
  modified_base 9: mod_base = OTHER; note = 2'-deoxy-2'-fluorocytidine-3'-phosphate
  modified_base 10: mod_base = OTHER; note = 2'-O-methyladenosine-3'-phosphate
  modified_base 11: mod_base = OTHER; note = 2'-O-methyladenosine-3'-phosphate
  modified_base 12: mod_base = OTHER; note = 2'-O-methylguanosine-3'-phosphate
  modified_base 13: mod_base = OTHER; note = 2'-O-methyluridine-3'-phosphate
  modified_base 14: mod_base = OTHER; note = 2'-deoxy-2'-fluorouridine-3'-phosphate
  modified_base 15: mod_base = OTHER; note = 2'-O-methylguanosine-3'-phosphate
  modified_base 16: mod_base = OTHER; note = 2'-deoxy-2'-fluorocytidine-3'-phosphate
  modified_base 17: mod_base = OTHER; note = 2'-O-methyladenosine-3'-phosphate
  modified_base 18: mod_base = OTHER; note = 2'-O-methyladenosine-3'-phosphate
  modified_base 19: mod_base = OTHER; note = 2'-O-methyladenosine-3'-phosphate
  modified_base 20: mod_base = OTHER; note = 2'-O-methyluridine-3'-phosphate
  modified_base 21: mod_base = OTHER; note = 2'-O-methylcytidine-3'-phosphorothioate
  modified_base 22: mod_base = OTHER; note = 2'-O-methyluridine-3'-phosphorothioate
  modified_base 23: mod_base = OTHER; note = 2'-O-methyluridine
atgggtagcaagttgcaaatctt

SEQ ID NO: 1736 - RNA, 23 nt, synthetic construct
  source 1..23: mol_type = other RNA
ccattaggataatgtcttatgta

SEQ ID NO: 1737 - RNA, 23 nt, synthetic construct
  source 1..23: mol_type = other RNA
cgggggtaacaagatgataatct

SEQ ID NO: 1738 - RNA, 23 nt, synthetic construct
  source 1..23: mol_type = other RNA
gtctccatggcgggggtaacaag

SEQ ID NO: 1739 - RNA, 23 nt, synthetic construct
  source 1..23: mol_type = other RNA
attaggataatgtcttatgtaat

SEQ ID NO: 1740 - RNA, 23 nt, synthetic construct
  source 1..23: mol_type = other RNA
agatgttagtagaataagcctta

SEQ ID NO: 1741 - RNA, 23 nt, synthetic construct
  source 1..23: mol_type = other RNA
actgagtgaagaaatgaaagaca

SEQ ID NO: 1742 - RNA, 23 nt, synthetic construct
  source 1..23: mol_type = other RNA
aagatttgcaacttgctacccat

SEQ ID NO: 1743 - RNA, 23 nt, synthetic construct
  source 1..23: mol_type = other RNA
ggataatgtcttatgtaatgctg

SEQ ID NO: 1744 - RNA, 23 nt, synthetic construct
  source 1..23: mol_type = other RNA
aattttagaacacctttttcacc

SEQ ID NO: 1745 - RNA, 23 nt, synthetic construct
  source 1..23: mol_type = other RNA
gtggccttatccctccttccttc

SEQ ID NO: 1746 - RNA, 23 nt, synthetic construct
  source 1..23: mol_type = other RNA
ggtggatacatgagcaagatttg

SEQ ID NO: 1747 - RNA, 23 nt, synthetic construct
  source 1..23: mol_type = other RNA
ccctattaatggtcagactgttc

SEQ ID NO: 1748 - RNA, 23 nt, synthetic construct
  source 1..23: mol_type = other RNA
tcttatgtaatgctgccctgtac

SEQ ID NO: 1749 - RNA, 23 nt, synthetic construct
  source 1..23: mol_type = other RNA
aggtgctaaagtttcccatcttt

SEQ ID NO: 1750 - RNA, 23 nt, synthetic construct
  source 1..23: mol_type = other RNA
gttacctgttgaattttgtatta

SEQ ID NO: 1751 - RNA, 23 nt, synthetic construct
  source 1..23: mol_type = other RNA
acttgctacccattaggataatg

SEQ ID NO: 1752 - RNA, 23 nt, synthetic construct
  source 1..23: mol_type = other RNA
agaaatgaaagacaaaggtggat

SEQ ID NO: 1753 - RNA, 23 nt, synthetic construct
  source 1..23: mol_type = other RNA
ccagcatgaggttcttagaatga

SEQ ID NO: 1754 - RNA, 23 nt, synthetic construct
  source 1..23: mol_type = other RNA
ctaggaagcaacctttcgcctgt

SEQ ID NO: 1755 - RNA, 23 nt, synthetic construct
  source 1..23: mol_type = other RNA
ccattaggataatgtcttatgta

SEQ ID NO: 1756 - RNA, 23 nt, synthetic construct
  source 1..23: mol_type = other RNA
agcaagatttgcaacttgctacc

SEQ ID NO: 1757 - RNA, 23 nt, synthetic construct
  source 1..23: mol_type = other RNA
gatgccaaaacaaccatcaccgt

SEQ ID NO: 1758 - RNA, 23 nt, synthetic construct
  source 1..23: mol_type = other RNA
acccattaggataatgtcttatg

SEQ ID NO: 1759 - RNA, 23 nt, synthetic construct
  source 1..23: mol_type = other RNA
tgttacctgttgaattttgtatt
